(19) United States
(12) Patent Application Publication
(10) Pub. No.: US 2025/0163401 A1
(43) Pub. Date: May 22, 2025

(54) ENGINEERED RNA LIGASES

(71) Applicant: Codexis, Inc., Redwood City, CA (US)

(72) Inventors: Marina Mikhailovna Bakhtina, Redwood City, CA (US); David Elgart, San Mateo, CA (US); Nikki D. Kruse, San Carlos, CA (US); Mathew G. Miller, San Carlos, CA (US); Jovana Nazor, Milpitas, CA (US); Scott J. Novick, Palo Alto, CA (US); Amani Shoubber, Santa Clara, CA (US); Ljubica Vojcic, San Jose, CA (US)

(21) Appl. No.: 18/955,904

(22) Filed: Nov. 21, 2024

Related U.S. Application Data
(60) Provisional application No. 63/601,699, filed on Nov. 21, 2023.

(51) Int. Cl. C12N 9/00; C12N 15/11; C12N 15/70; C12P 21/02

(52) U.S. Cl. CPC C12N 9/93; C12N 15/11; C12N 15/70; C12P 21/02; C12N 2310/315; C12N 2310/32; C12Y 605/01003

(57) ABSTRACT

The present disclosure provides engineered RNA ligases, recombinant polynucleotides encoding the engineered RNA ligases, and compositions of the engineered RNA ligases. The present disclosure further provides uses of the engineered RNA ligases for ligation of polynucleotide substrates.

### CROSS-REFERENCE TO RELATED APPLICATIONS

[0001] This application claims the benefit of U.S. Provisional Application 63/601,699, filed Nov. 21, 2023, which is incorporated by reference herein.

### REFERENCE TO SEQUENCE LISTING, TABLE OR COMPUTER PROGRAM

[0002] The Sequence Listing concurrently submitted herewith as file name CX9-256WO2_ST26.xml, created on Nov. 13, 2024, with a file size of 1,902,579 bytes, is part of the specification and is hereby incorporated by reference herein.

### BACKGROUND

[0003] RNA ligases are a family of enzymes that catalyze the joining of pieces of RNA or DNA that are adjacent to each other. They are involved in the editing and repair of RNA, and therefore, are essential proteins for biological processes. RNA ligases find uses in the profiling of target sequences, the quantification of different RNA species, the detection of particular RNA mutations, and the synthesis of polynucleotides. Based on their substrate preference, the known RNA ligases are categorized into two groups. Single stranded RNA ligases, also referred to as RNA ligase 1 or RNA ligase I, are capable of joining two RNA or DNA without a hybridizing template. Double stranded RNA ligases, also referred to as RNA ligase 2 or RNA ligase II, preferentially join a nick in an RNA duplex. RNA ligase 1 type proteins have been identified in fungi, baculoviruses, archea, and archeal viruses (thermostable properties). RNA ligase 2 type enzymes have been identified in Vibrio phage KVP40, baculoviruses and entomopoxviruses, some parasites, and archaea species.

[0004] Protopypical RNA ligases are those from bacteriophage T4. The T4 RNA Ligase 1 ligates a 5′-phosphoryl nucleic acid donor to a 3′-hydroxyl nucleic acid acceptor by connecting them with a phosphodiester bond in an ATP dependent reaction. Substrates for T4 RNA Ligase 1 include ssRNA, ssDNA, and dinucleoside pyrophosphates. T4 RNA ligase 1 is used for ligation of ssRNA and DNA, RNA ligase-mediated rapid amplification of cDNA ends (RLM-RACE), ligation of oligonucleotide adapters to cDNA or single-stranded primer extension products for PCR, oligonucleotide synthesis, and various 5′ nucleotide modifications of nucleic acids. T4 RNA ligase 2 ligates adjacent 5′ phosphate at the end of RNA and DNA strands to 3′ OH of RNA strands in the context of nicked dsRNA or RNA/DNA hybrids. T4 RNA ligase 2 exhibits significant homology to DNA ligases and mRNA capping enzymes, and is used to seal nicks in dsRNA and dsRNA/DNA hybrids. While T4 RNA ligases can act on RNA and DNA, RNA is the preferred substrate, with DNA being a less effective acceptor in the ligation reaction.

[0005] While T4 RNA ligases have become useful tools for labeling, circularizing, and ligating RNA and RNA/DNA, desirable are ligases that provide more facile and efficient ligation of polynucleotide substrates, including improved ligation of polynucleotides that contain nucleotide analogs, such as modified sugar residues and non-standard internucleoside linkages.

### SUMMARY

[0006] The present disclosure provides engineered RNA ligase polypeptides and compositions thereof, as well as polynucleotides encoding the engineered RNA ligase polypeptides. The present disclosure also provides methods of using the engineered RNA ligase polypeptides and compositions thereof for nucleic acid synthesis, diagnostic assays, and other purposes.

[0007] In one aspect, the present disclosure provides an engineered RNA ligase, or functional fragment thereof, comprising an amino acid sequence having at least 70%, 75%, 80%, 81%, 82%, 83%, 84%, 85%, 86%, 87%, 88%, 89%, 90%, 91%, 92%, 93%, 94%, 95%, 96%, 97%, 98%, 99%, or more sequence identity to a reference sequence corresponding to residues 12 to 343 of an even numbered SEQ ID NO. of SEQ ID NOs: 2-220, 224-252, and 270-958, or to a reference sequence corresponding to an even numbered SEQ ID NO. of SEQ ID NOs: 2-220, 224-252, and 270-958, wherein the amino acid sequence comprises one or more substitutions relative to the reference sequence corresponding to residues 12 to 343 of SEQ ID NO: 2, 4, 106, 218, 286, 396, 436, 520, 552, or 582, or relative to the reference sequence corresponding to SEQ ID NO: 2, 4, 106, 218, 286, 396, 436, 520, 552, or 582.

[0008] In some embodiments, the engineered RNA ligase comprises an amino acid sequence having at least 70%, 75%, 80%, 81%, 82%, 83%, 84%, 85%, 86%, 87%, 88%, 89%, 90%, 91%, 92%, 93%, 94%, 95%, 96%, 97%, 98%, 99%, or more sequence identity to a reference sequence corresponding to residues 12 to 343 of SEQ ID NO: 2, 4, 106, 218, 286, 396, 436, 520, 552, or 582, or to a reference sequence corresponding to SEQ ID NO: 2, 4, 106, 218, 286, 396, 436, 520, 552, or 582, wherein the amino acid sequence comprises one or more substitutions relative to the reference sequence corresponding to residues 12 to 343 of SEQ ID NO: 2, 4, 106, 218, 286, 396, 436, 520, 552, or 582, or relative to the reference sequence corresponding to SEQ ID NO: 2, 4, 106, 218, 286, 396, 436, 520, 552, or 582.

[0009] In some embodiments, the engineered RNA ligase comprises an amino acid sequence having at least 70%, 75%, 80%, 81%, 82%, 83%, 84%, 85%, 86%, 87%, 88%, 89%, 90%, 91%, 92%, 93%, 94%, 95%, 96%, 97%, 98%, 99%, or more sequence identity to the reference sequence corresponding to residues 12 to 343 of SEQ ID NO: 2, or to the reference sequence corresponding to SEQ ID NO: 2, wherein the amino acid sequence comprises one or more substitutions relative to the reference sequence corresponding to residues 12 to 343 of SEQ ID NO: 2, or relative to the reference sequence corresponding to SEQ ID NO: 2.

[0010] In some embodiments, the engineered RNA ligase comprises an amino acid sequence having at least 70%, 75%, 80%, 81%, 82%, 83%, 84%, 85%, 86%, 87%, 88%, 89%, 90%, 91%, 92%, 93%, 94%, 95%, 96%, 97%, 98%, 99%, or more sequence identity to the reference sequence corresponding to residues 12 to 343 of SEQ ID NO: 4, 106, 218, 286, 396, 436, 520, 552, or 582, or to the reference sequence corresponding to SEQ ID NO: 4, 106, 218, 286, 396, 436, 520, 552, or 582, wherein the amino acid sequence comprises one or more substitutions relative to the reference sequence corresponding to residues 12 to 343 of SEQ ID NO: 2, or relative to the reference sequence corresponding to SEQ ID NO: 2.

[0011] In some embodiments, the engineered RNA ligase comprises an amino acid sequence having at least 70%, 75%, 80%, 81%, 82%, 83%, 84%, 85%, 86%, 87%, 88%, 89%, 90%, 91%, 92%, 93%, 94%, 95%, 96%, 97%, 98%, 99%, or more sequence identity to the reference sequence corresponding to residues 12 to 343 of an even-numbered SEQ ID NO. of SEQ ID NOs: 4-220, 224-252, and 270-958, or to a reference sequence corresponding to an even-numbered SEQ ID NO. of SEQ ID NOs: 4-220, 224-252, and 270-958, wherein the amino acid sequence comprises one or more substitutions relative to the reference sequence corresponding to residues 12 to 343 of SEQ ID NO: 2, or relative to the reference sequence corresponding to SEQ ID NO: 2.

[0012] In some embodiments, amino acid sequence of the engineered RNA ligase comprises at least a substitution at amino acid position 11, 12, 14, 16, 17, 23, 25, 26, 30, 32, 33, 38, 40, 52, 57, 60, 68, 69, 71, 73, 75, 79, 82, 83, 92, 93, 95, 96, 98, 100, 101, 102, 103, 111, 114, 117, 118, 119, 120, 135, 136, 141, 142, 145, 147, 156, 167, 168, 170, 171, 174, 177, 179, 183, 184, 185, 188, 189, 190, 191, 192, 193, 196, 200, 202, 205, 206, 207, 209, 221, 229, 254, 255, 259, 270, 271, 287, 288, 289, 292, 295, 296, 300, 307, 320, 327, 332, 333, 334, 335, 336, 337, 339, 342, or 343, or combinations thereof, wherein the amino acid positions are relative to the reference sequence corresponding to residues 12 to 343 of SEQ ID NO: 2, or relative to the reference sequence corresponding to SEQ ID NO: 2.

[0013] In some embodiments, the amino acid sequence of the engineered RNA ligase comprises at least a substitution at amino acid position 33, 38, 71, 73, 75, 96, 98, 101, 114, 117, 136, 156, 179, 184, 191, 196, 221, 289, 292, 296, 320, 335, 336, or 339, or combinations thereof, wherein the amino acid positions are relative to the reference sequence corresponding to residues 12 to 343 of SEQ ID NO: 2, or relative to the reference sequence corresponding to SEQ ID NO: 2.

[0014] In some embodiments, the amino acid sequence of the engineered RNA ligase comprises at least a substitution or substitution set at amino acid position(s) 179, 33/101/221/320/335/336/339, 38/71/114/184/191/196, 117, 292, 75/136/296, or 98, wherein the amino acid positions are relative to the reference sequence corresponding to residues 12 to 343 of SEQ ID NO: 2, or relative to the reference sequence corresponding to SEQ ID NO: 2.

[0015] In some embodiments, the amino acid sequence of the engineered RNA ligase comprises at least a substitution or substitution set at amino acid position 14, 32, 33, 38, 40, 57, 60, 71, 75, 82, 92, 96, 98, 101, 114, 141, 142, 145, 170, 171, 174, 179, 184, 191, 193, 196, 202, 205, 207, 209, 221, 255, 320, 327, 339, or 342, or combinations thereof, wherein the amino acid positions are relative to the reference sequence corresponding to residues 12 to 343 of SEQ ID NO: 2, or relative to the reference sequence corresponding to SEQ ID NO: 2.

[0016] In some embodiments, the amino acid sequence of the engineered RNA ligases comprises at least one substitution set forth in Tables 3, 4, 5, 6, 7.1, 7.2, 8, 9, 10, 11.3, 11.4, and 12, wherein the amino acid positions are relative to the reference sequence corresponding to residues 12 to 343 of SEQ ID NO: 2, or relative to the reference sequence corresponding to SEQ ID NO: 2.

[0017] In some embodiments, the amino acid sequence of the engineered RNA ligases comprises at least a substitution or substitution set of an RNA ligase variant forth in Tables 3, 4, 5, 6, 7.1, 7.2, 8, 9, 10, 11.3, 11.4, and 12, wherein the amino acid positions are relative to the reference sequence corresponding to residues 12 to 343 of SEQ ID NO: 2, or relative to the reference sequence corresponding to SEQ ID NO: 2.

[0018] In some embodiments, the engineered RNA ligase comprises an amino acid sequence having at least 70%, 75%, 80%, 81%, 82%, 83%, 84%, 85%, 86%, 87%, 88%, 89%, 90%, 91%, 92%, 93%, 94%, 95%, 96%, 97%, 98%, 99%, or more sequence identity to a reference sequence corresponding to residues 12 to 343 of SEQ ID NO: 2, 4, 106, 218, 286, 396, 436, 520, 552, or 582, or to a reference sequence corresponding to SEQ ID NO: 2, 4, 106, 218, 286, 396, 436, 520, 552, or 582.

[0019] In some embodiments, the engineered RNA ligase comprises an amino acid sequence having at least 70%, 75%, 80%, 81%, 82%, 83%, 84%, 85%, 86%, 87%, 88%, 89%, 90%, 91%, 92%, 93%, 94%, 95%, 96%, 97%, 98%, 99%, or more sequence identity to a reference sequence corresponding to residues 12 to 343 of an even-numbered SEQ ID NO of SEQ ID NOs: 4-220, 224-252, and 270-958, or to a reference sequence corresponding to an even-numbered SEQ ID NO of SEQ ID NOs: 4-220, 224-252, and 270-958.

[0020] In some embodiments, the engineered RNA ligase comprises an amino acid sequence having at least 70%, 75%, 80%, 81%, 82%, 83%, 84%, 85%, 86%, 87%, 88%, 89%, 90%, 91%, 92%, 93%, 94%, 95%, 96%, 97%, 98%, 99%, or more sequence identity to a reference sequence corresponding to residues 12 to 343 of SEQ ID NO: 4, 106, 218, 286, 396, 436, 520, 552, or 582, or to a reference sequence corresponding to SEQ ID NO: 4, 106, 218, 286, 396, 436, 520, 552, or 582, wherein the amino acid sequence comprises one or more substitutions relative to the reference sequence corresponding to residues 12 to 343 of SEQ ID NO: 4, 106, 218, 286, 396, 436, 520, 552, or 582, or relative to the reference sequence corresponding to SEQ ID NO: 4, 106, 218, 286, 396, 436, 520, 552, or 582.

[0021] In some embodiments, the engineered RNA ligase comprises an amino acid sequence having at least 70%, 75%, 80%, 81%, 82%, 83%, 84%, 85%, 86%, 87%, 88%, 89%, 90%, 91%, 92%, 93%, 94%, 95%, 96%, 97%, 98%, 99%, or more sequence identity to a reference sequence corresponding to residues 12 to 343 of an even-numbered SEQ ID NO of SEQ ID NOs: 4-220, 224-252, and 270-958, or to a reference sequence corresponding to an even-numbered SEQ ID NO of SEQ ID NOs: 4-220, 224-252, and 270-958, wherein the amino acid sequence comprises one or more substitutions relative to the reference sequence corresponding to residues 12 to 343 of SEQ ID NO: 4, 106, 218, 286, 396, 436, 520, 552, or 582, or relative to the reference sequence corresponding to SEQ ID NO: 4, 106, 218, 286, 396, 436, 520, 552, or 582.

[0022] In some embodiments, the amino acid sequence of the engineered RNA ligase comprises at least a substitution at amino acid position 11, 12, 14, 16, 17, 23, 25, 26, 30, 32, 33, 38, 40, 52, 57, 60, 68, 69, 71, 73, 75, 79, 82, 83, 92, 93, 95, 96, 98, 100, 101, 102, 103, 111, 114, 117, 118, 119, 120, 135, 136, 141, 142, 145, 147, 156, 167, 168, 170, 171, 174, 177, 179, 183, 184, 185, 188, 189, 190, 191, 192, 193, 196, 200, 202, 205, 206, 207, 209, 221, 229, 254, 255, 259, 270, 271, 287, 288, 289, 292, 295, 296, 300, 307, 320, 327, 332, 333, 334, 335, 336, 337, 339, 342, or 343, or combinations thereof, wherein the amino acid positions are relative to the reference sequence corresponding to residues 12 to 343 of SEQ ID NO: 4, 106, 218, 286, 396, 436, 520, 552, or 582, or relative to the reference sequence corresponding to SEQ ID NO: 4, 106, 218, 286, 396, 436, 520, 552, or 582.

[0023] In some embodiments, the amino acid sequence of the engineered RNA ligase comprises at least a substitution at amino acid position 33, 38, 71, 73, 75, 96, 98, 101, 114, 117, 136, 156, 179, 184, 191, 196, 221, 289, 292, 296, 320, 335, 336, or 339, or combinations thereof, wherein the amino acid positions are relative to the reference sequence corresponding to residues 12 to 343 of SEQ ID NO: 4, 106, 218, 286, 396, 436, 520, 552, or 582, or relative to the reference sequence corresponding to SEQ ID NO: 4, 106, 218, 286, 396, 436, 520, 552, or 582.

[0024] In some embodiments, the engineered RNA ligase comprises an amino acid sequence having at least 70%, 75%, 80%, 81%, 82%, 83%, 84%, 85%, 86%, 87%, 88%, 89%, 90%, 91%, 92%, 93%, 94%, 95%, 96%, 97%, 98%, 99%, or more sequence identity to a reference sequence corresponding to residues 12 to 343 of SEQ ID NO: 4, or to a reference sequence corresponding to SEQ ID NO: 4, wherein the amino acid sequence comprises one or more substitutions relative to the reference sequence corresponding to residues 12 to 343 of SEQ ID NO: 4, or relative to the reference sequence corresponding to SEQ ID NO: 4.

[0025] In some embodiments, the engineered RNA ligase comprises an amino acid sequence having at least 70%, 75%, 80%, 81%, 82%, 83%, 84%, 85%, 86%, 87%, 88%, 89%, 90%, 91%, 92%, 93%, 94%, 95%, 96%, 97%, 98%, 99%, or more sequence identity to a reference sequence corresponding to residues 12 to 343 of an even-numbered SEQ ID NO. of SEQ ID NOs: 4-104, or to a reference sequence corresponding to an even-numbered SEQ ID NO. of SEQ ID NOs: 4-104, wherein the amino acid sequence comprises one or more substitutions relative to the reference sequence corresponding to residues 12 to 343 of SEQ ID NO: 4, or relative to the reference sequence corresponding to SEQ ID NO: 4.

[0026] In some embodiments, the amino acid sequence of the engineered RNA ligase comprises at least a substitution set at amino acid position(s) 33/101/221/320/335/336/339, 71/92/171/184/202, 40/92/171/202/327, 196/300/335/339, 33/184/221/300/320, 335/336/339, 184/196/221/336, 33/184/320/335/336, 207/209/221/300/320/336/339, 101/196/221/300/335, 207/209/300/320, 40/170/171/202/327, 33/101/184/196/209/336/339, 40/71/92/171/184/327, 207/335/336/339, 33/101/196/300/320/335/336/339, 57/171/179/184/202/327, 57/92/202/327, 33/101/207/221/300/335/336/339, 33/221/336, 196/221/300/335/336/339, 33/184/221/336/339, 33/184/196/221/300, 101/196/207/209/221/300/336/339, 101/184/335/336/339, 33/184/196/320/336/339, 33/184/196/300/320/335/336/339, 184/320/335/336/339, 184/196/207/209/300/335/336/339, 184/196/320/335/336/339, 33/196/209/221/339, 184/320/335/336/339, 101/209/335/336/339, 101/196/209/339, 40/71/82/170/171/179/202/327, 320/335/336/339, 101/184/300/335/336/339, 33/101/196/209/335/336/339, 33/196/300/320, 221/335, 33/184/196/207/221, 221/335/336/339, 196/209/300/335/336/339, 184/196/300/320, 57/171/202/327, 40/71/171/184, 184/196/221, 33/196/207/335/336, 32/57/71/202/327/342, 33/196/221/336, 101/221/300/320/335/336/339, 33/101/207/221, 101/184/196/209/221, 33/207/209/300/335/336/339, or 33/83/184/196/300/336, wherein the amino acid positions are relative to the reference sequence corresponding to residues 12 to 343 of SEQ ID NO: 4, or relative to the reference sequence corresponding to SEQ ID NO: 4.

[0027] In some embodiments, the engineered RNA ligase comprises an amino acid sequence having at least 70%, 75%, 80%, 81%, 82%, 83%, 84%, 85%, 86%, 87%, 88%, 89%, 90%, 91%, 92%, 93%, 94%, 95%, 96%, 97%, 98%, 99%, or more sequence identity to a reference sequence corresponding to residues 12 to 343 of SEQ ID NO: 106, or to a reference sequence corresponding to SEQ ID NO: 106, wherein the amino acid sequence comprises one or more substitutions relative to the reference sequence corresponding to residues 12 to 343 of SEQ ID NO: 106, or relative to the reference sequence corresponding to SEQ ID NO: 106.

[0028] In some embodiments, the engineered RNA ligase comprises an amino acid sequence having at least 70%, 75%, 80%, 81%, 82%, 83%, 84%, 85%, 86%, 87%, 88%, 89%, 90%, 91%, 92%, 93%, 94%, 95%, 96%, 97%, 98%, 99%, or more sequence identity to a reference sequence corresponding to residues 12 to 343 of an even-numbered SEQ ID NO of SEQ ID NOs: 218-220 and 224-252, or to a reference sequence corresponding to an even-numbered SEQ ID NO of SEQ ID NOs: 218-220 and 224-252, wherein the amino acid sequence comprises one or more substitutions relative to the reference sequence corresponding to residues 12 to 343 of SEQ ID NO: 106, or relative to the reference sequence corresponding to SEQ ID NO: 106.

[0029] In some embodiments, the amino acid sequence of the engineered RNA ligase comprises at least a substitution or substitution set at amino acid position(s) 38/71/114/184/191/196, 141/170/171/174, 114, 57/60/170/171/174/192/196/320, 60/92/170/171, 141/174/196, 57/170/171/174, 141/184, 57/60/141/170/171/174/192, 60/170/174, 141/170/171, 69/71/114/184, 38/40, 40/71/98/184/259, 32/60/141/170/171/174/196/320, 32/170/207/320, or 196, wherein the amino acid positions are relative to the reference sequence corresponding to residues 12 to 343 of SEQ ID NO: 106, or relative to the reference sequence corresponding to SEQ ID NO: 106.

[0030] In some embodiments, the engineered RNA ligase comprises an amino acid sequence having at least 70%, 75%, 80%, 81%, 82%, 83%, 84%, 85%, 86%, 87%, 88%, 89%, 90%, 91%, 92%, 93%, 94%, 95%, 96%, 97%, 98%, 99%, or more sequence identity to a reference sequence corresponding to residues 12 to 343 of SEQ ID NO: 218, or to a reference sequence corresponding to SEQ ID NO: 218, wherein the amino acid sequence comprises one or more substitutions relative to the reference sequence corresponding to residues 12 to 343 of SEQ ID NO: 218, or relative to the reference sequence corresponding to SEQ ID NO: 218.

[0031] In some embodiments, the engineered RNA ligase comprises an amino acid sequence having at least 70%, 75%, 80%, 81%, 82%, 83%, 84%, 85%, 86%, 87%, 88%, 89%, 90%, 91%, 92%, 93%, 94%, 95%, 96%, 97%, 98%, 99%, or more sequence identity to a reference sequence corresponding to residues 12 to 343 of an even-numbered SEQ ID NO of SEQ ID NOs: 270-312, or to a reference sequence corresponding to an even-numbered SEQ ID NO of SEQ ID NOs: 270-312, wherein the amino acid sequence comprises one or more substitutions relative to the reference sequence corresponding to residues 12 to 343 of SEQ ID NO: 218, or relative to the reference sequence corresponding to SEQ ID NO: 218.

[0032] In some embodiments, the amino acid sequence of the engineered RNA ligase comprises at least a substitution or substitution set at amino acid position(s) 102, 17, 190, 16, 68, 23, 270, 117/229, or 117, wherein the amino acid positions are relative to the reference sequence corresponding to residues 12 to 343 of SEQ ID NO: 218, or relative to the reference sequence corresponding to SEQ ID NO: 218.

[0033] In some embodiments, the engineered RNA ligase comprises an amino acid sequence having at least 70%, 75%, 80%, 81%, 82%, 83%, 84%, 85%, 86%, 87%, 88%, 89%, 90%, 91%, 92%, 93%, 94%, 95%, 96%, 97%, 98%, 99%, or more sequence identity to a reference sequence corresponding to residues 12 to 343 of SEQ ID NO: 286, or to a reference sequence corresponding to SEQ ID NO: 286, wherein the amino acid sequence comprises one or more substitutions relative to the reference sequence corresponding to residues 12 to 343 of SEQ ID NO: 286, or relative to the reference sequence corresponding to SEQ ID NO: 286.

[0034] In some embodiments, the engineered RNA ligase comprises an amino acid sequence having at least 70%, 75%, 80%, 81%, 82%, 83%, 84%, 85%, 86%, 87%, 88%, 89%, 90%, 91%, 92%, 93%, 94%, 95%, 96%, 97%, 98%, 99%, or more sequence identity to a reference sequence corresponding to residues 12 to 343 of an even-numbered SEQ ID NO of SEQ ID NOs: 314-426, or to a reference sequence corresponding to an even-numbered SEQ ID NO of SEQ ID NOs: 314-426, wherein the amino acid sequence comprises one or more substitutions relative to the reference sequence corresponding to residues 12 to 343 of SEQ ID NO: 286, or relative to the reference sequence corresponding to SEQ ID NO: 286.

[0035] In some embodiments, the amino acid sequence of the engineered RNA ligase comprises at least a substitution or substitution set at amino acid position(s) 1296, 114/117, 26, 30, 117/118, 117/119, 14, 183, 117, 185, 307, 12, 93/135, 135, 92, 288, 117/120, 79, 100, 287, 292, 25, 75, 327, or 111, wherein the amino acid positions are relative to the reference sequence corresponding to residues 12 to 343 of SEQ ID NO: 286, or relative to the reference sequence corresponding to SEQ ID NO: 286.

[0036] In some embodiments, the engineered RNA ligase comprises an amino acid sequence having at least 70%, 75%, 80%, 81%, 82%, 83%, 84%, 85%, 86%, 87%, 88%, 89%, 90%, 91%, 92%, 93%, 94%, 95%, 96%, 97%, 98%, 99%, or more sequence identity to a reference sequence corresponding to residues 12 to 343 of SEQ ID NO: 396, or to a reference sequence corresponding to SEQ ID NO: 396, wherein the amino acid sequence comprises one or more substitutions relative to the reference sequence corresponding to residues 12 to 343 of SEQ ID NO: 396, or relative to the reference sequence corresponding to SEQ ID NO: 396.

[0037] In some embodiments, the engineered RNA ligase comprises an amino acid sequence having at least 70%, 75%, 80%, 81%, 82%, 83%, 84%, 85%, 86%, 87%, 88%, 89%, 90%, 91%, 92%, 93%, 94%, 95%, 96%, 97%, 98%, 99%, or more sequence identity to a reference sequence corresponding to residues 12 to 343 of an even-numbered SEQ ID NO of SEQ ID NOs: 428-488, or to a reference sequence corresponding to an even-numbered SEQ ID NO of SEQ ID NOs: 428-488, wherein the amino acid sequence comprises one or more substitutions relative to the reference sequence corresponding to residues 12 to 343 of SEQ ID NO: 396, or relative to the reference sequence corresponding to SEQ ID NO: 396.

[0038] In some embodiments, the amino acid sequence of the engineered RNA ligase comprises at least a substitution or substitution set at amino acid position(s) 102/119, 75/102, 75/102/117, 75/119, 75/136/296, 75/327, 75/117/119, 119, 119/296, 14/102/119, 14/102/296, 14/75, 14/75/119, 14/75/119/327, 14/75/117/119, 14/75/117/119/296, 14/119, 14/296, 14/30/270, 14/25, 14/117, 14/117/119, 14/117/119/296, 14/117/296/327, 26/75/327, 25/75, 25/30/102, 117, 117/119, or 117/119/296, wherein the amino acid positions are relative to the reference sequence corresponding to residues 12 to 343 of SEQ ID NO: 396, or relative to the reference sequence corresponding to SEQ ID NO: 396.

[0039] In some embodiments, the engineered RNA ligase comprises an amino acid sequence having at least 70%, 75%, 80%, 81%, 82%, 83%, 84%, 85%, 86%, 87%, 88%, 89%, 90%, 91%, 92%, 93%, 94%, 95%, 96%, 97%, 98%, 99%, or more sequence identity to a reference sequence corresponding to residues 12 to 343 of SEQ ID NO: 436, or to a reference sequence corresponding to SEQ ID NO: 436, wherein the amino acid sequence comprises one or more substitutions relative to the reference sequence corresponding to residues 12 to 343 of SEQ ID NO: 436, or relative to the reference sequence corresponding to SEQ ID NO: 436.

[0040] In some embodiments, the engineered RNA ligase comprises an amino acid sequence having at least 70%, 75%, 80%, 81%, 82%, 83%, 84%, 85%, 86%, 87%, 88%, 89%, 90%, 91%, 92%, 93%, 94%, 95%, 96%, 97%, 98%, 99%, or more sequence identity to a reference sequence corresponding to residues 12 to 343 of an even-numbered SEQ ID NO of SEQ ID NOs: 490-534, or to a reference sequence corresponding to an even-numbered SEQ ID NO of SEQ ID NOs: 490-534, wherein the amino acid sequence comprises one or more substitutions relative to the reference sequence corresponding to residues 12 to 343 of SEQ ID NO: 436, or relative to the reference sequence corresponding to SEQ ID NO: 436.

[0041] In some embodiments, the amino acid sequence of the engineered RNA ligase comprises at least a substitution at amino acid position 332, 156, 177, 333, 96, 11, 189, 327, 25, 73, 98, 335, 95, 188, or 52, or combinations thereof, wherein the amino acid positions are relative to the reference sequence corresponding to residues 12 to 343 of SEQ ID NO: 436, or relative to the reference sequence corresponding to SEQ ID NO: 436.

[0042] In some embodiments, the engineered RNA ligase comprises an amino acid sequence having at least 70%, 75%, 80%, 81%, 82%, 83%, 84%, 85%, 86%, 87%, 88%, 89%, 90%, 91%, 92%, 93%, 94%, 95%, 96%, 97%, 98%, 99%, or more sequence identity to a reference sequence corresponding to residues 12 to 343 of SEQ ID NO: 520, or to a reference sequence corresponding to SEQ ID NO: 520, wherein the amino acid sequence comprises one or more substitutions relative to the reference sequence corresponding to residues 12 to 343 of SEQ ID NO: 520, or relative to the reference sequence corresponding to SEQ ID NO: 520.

[0043] In some embodiments, the engineered RNA ligase comprises an amino acid sequence having at least 70%, 75%, 80%, 81%, 82%, 83%, 84%, 85%, 86%, 87%, 88%, 89%, 90%, 91%, 92%, 93%, 94%, 95%, 96%, 97%, 98%, 99%, or more sequence identity to a reference sequence corresponding to residues 12 to 343 of an even-numbered SEQ ID NO of SEQ ID NOs: 536-554, or to a reference sequence corresponding to an even-numbered SEQ ID NO of SEQ ID NOs: 536-554, wherein the amino acid sequence comprises one or more substitutions relative to the reference sequence corresponding to residues 12 to 343 of SEQ ID NO: 520, or relative to the reference sequence corresponding to SEQ ID NO: 520.

[0044] In some embodiments, the amino acid sequence of the engineered RNA ligase comprises at least a substitution set at amino acid position(s) 96/98/156/189/335, 73/96/98/189/335, 73/177/189, 73/98/177/189/335, 25/73/95/96/98/189/327, 25/98/189, 73/95/96/156/177, 73/335, 73/96/98/156/335, or 73/177/189/333, wherein the amino acid positions are relative to the reference sequence corresponding to residues 12 to 343 of SEQ ID NO: 520, or relative to the reference sequence corresponding to SEQ ID NO: 520.

[0045] In some embodiments, the engineered RNA ligase comprises an amino acid sequence having at least 70%, 75%, 80%, 81%, 82%, 83%, 84%, 85%, 86%, 87%, 88%, 89%, 90%, 91%, 92%, 93%, 94%, 95%, 96%, 97%, 98%, 99%, or more sequence identity to a reference sequence corresponding to residues 12 to 343 of SEQ ID NO: 552, or to a reference sequence corresponding to SEQ ID NO: 552, wherein the amino acid sequence comprises one or more substitutions relative to the reference sequence corresponding to residues 12 to 343 of SEQ ID NO: 552, or relative to the reference sequence corresponding to SEQ ID NO: 552.

[0046] In some embodiments, the engineered RNA ligase comprises an amino acid sequence having at least 70%, 75%, 80%, 81%, 82%, 83%, 84%, 85%, 86%, 87%, 88%, 89%, 90%, 91%, 92%, 93%, 94%, 95%, 96%, 97%, 98%, 99%, or more sequence identity to a reference sequence corresponding to residues 12 to 343 of an even-numbered SEQ ID NO of SEQ ID NOs: 556-584, or to a reference sequence corresponding to an even-numbered SEQ ID NO of SEQ ID NOs: 556-584, wherein the amino acid sequence comprises one or more substitutions relative to the reference sequence corresponding to residues 12 to 343 of SEQ ID NO: 552, or relative to the reference sequence corresponding to SEQ ID NO: 552.

[0047] In some embodiments, the amino acid sequence of the engineered RNA ligase comprises at least a substitution at amino acid position 292, 147, 255, 295, 75, 300, 333, 200, 289, 95, or 168, or combinations thereof, wherein the amino acid positions are relative to the reference sequence corresponding to residues 12 to 343 of SEQ ID NO: 552, or relative to the reference sequence corresponding to SEQ ID NO: 552.

[0048] In some embodiments, the engineered RNA ligase comprises an amino acid sequence having at least 70%, 75%, 80%, 81%, 82%, 83%, 84%, 85%, 86%, 87%, 88%, 89%, 90%, 91%, 92%, 93%, 94%, 95%, 96%, 97%, 98%, 99%, or more sequence identity to a reference sequence corresponding to residues 12 to 343 of SEQ ID NO: 582, or to a reference sequence corresponding to SEQ ID NO: 582, wherein the amino acid sequence comprises one or more substitutions relative to the reference sequence corresponding to residues 12 to 343 of SEQ ID NO: 582, or relative to the reference sequence corresponding to SEQ ID NO: 582.

[0049] In some embodiments, the engineered RNA ligase comprises an amino acid sequence having at least 70%, 75%, 80%, 81%, 82%, 83%, 84%, 85%, 86%, 87%, 88%, 89%, 90%, 91%, 92%, 93%, 94%, 95%, 96%, 97%, 98%, 99%, or more sequence identity to a reference sequence corresponding to residues 12 to 343 of an even-numbered SEQ ID NO of SEQ ID NOs: 586-958, or to a reference sequence corresponding to an even-numbered SEQ ID NO of SEQ ID NOs: 586-958, wherein the amino acid sequence comprises one or more substitutions relative to the reference sequence corresponding to residues 12 to 343 of SEQ ID NO: 582, or relative to the reference sequence corresponding to SEQ ID NO: 582.

[0050] In some embodiments, the amino acid sequence of the engineered RNA ligase comprises at least a substitution or substitution set at amino acid position(s) 95/156/337, 189/200/271, 200/271/289/337, 200/271/289, 189/200, 156/200/289, 156/168/189/271/300, 156/189/200/289, 156/168/289, 95/156/271/289, 156/333, 95/200/289/337, 168/200/289, 189/200/289, 333/337, 103/156/271, 95/156/200/300/333, 156/271/289/333, 95/156/271, 95/189/289, 95/156/168/189/271/289/300, 189/271/289, 95/168/271/300, 156/189/289/337, 200/271, 156/189/333, 189/289, 156/189/200/300/333/337, 156/189/200/271/289/337, 156/200/271/289/333/337, 168/271/300, 289/337, 156/168/337, 156/168/189/289, 156/271/289, 189/300, 156/289/300/337, 168/189/289, 95/156/168/300, 156/200/300/337, 289/333/337, 95/189/200/300/337, 95/156/189/200/271/333, 200/271/289/300, 289/333, 189/271/300, 95/300, 95/189/333/337, 95/189/271/300, 95/189/200/289, 168, 156/200/271/289/337, 95/168/289, 156/289, 95/156/189/271/289, 156/168/189/200/289/333, 156/300/333/337, 95/156/189/200/271/337, 271, 156/271, 156/271/300/333, 95/168/200, 168/271, 95/200/333, 189/200/271/289/333, 95/168/189/333/337, 189, 189/333/337, 156/189/271/289/333, 289, 95/156/200/271/289, 289/300/333, 95/189/289/337, 95/156/168/189/289, 271/289, 333, 168/337, 156/189/271/289, 95/156/189/337, 156/189/271/300, 156/168/289/333, 168/189/289/333, 95/333, 333/343, 156/189/289, 95/289/300, 95/156/189/200/300/333/337, 189/200/271/289/337, 95/156/168/189/289/337, 95/289, 156/289/333/337, 156/289/337, 337, 168/289, 95/156/300, 95/156/289, 95/189/271/333/337, 95/168/300, 95/156/168/271/333/337, 95/189/289/333/337, 156/168/200/289/334, 95/156/168/189/271/289, 156/189/200/289/337, 200/289, 200/289/333/337, 95/168/189/200/289, 168/200, 156/168/271/289, 189/206/289, 156/200/289/333/335, 156/200/289/333, 189/200/289/333, 189/289/335, 189/254/289/333, 167/189/206/289/333/335, 156/200/333, 156/200/289/335, 156/189/289/335, 335, 156/167/189/289, 156/189/200/289/335, 200/289/333/335, 156/189/200/289/333, 254/333/335, 189/254/333/335, 189/335, 156/189/254/289, 156/289/333, 289/335, 189/200/254/289/333, 156/189/289/333, 25/156/189/289, 156/189/206/289/333/335, 289/333/335, 156/254/289/333, 156/289/333/335, 254/289, 200/289/333, 156/189/200, 156/254/333/335, 156, 254/289/335, 156/206/289, 156/289/335, 206/289/333/335, 156/189/254/289/333, 156/254/289, 200/289/335, 156/189/206/289, 156/189/200/206/254/289/333, 25/254/333, 189/289/333/335, 156/189/200/289/333/335, 254/289/333, or 156/200/333/335, wherein the amino acid positions are relative to the reference sequence corresponding to residues 12 to 343 of SEQ ID NO: 582, or relative to the reference sequence corresponding to SEQ ID NO: 582.

[0051] In some embodiments, the amino acid sequence of the engineered RNA ligase comprises at least one substitution set forth in Tables 3, 4, 5, 6, 7.1, 7.2, 8, 9, 10, 11.3, 11.4, and 12, wherein the amino acid positions are relative to the reference sequence corresponding to residues 12 to 343 of SEQ ID NO: 2, 4, 106, 218, 286, 396, 436, 520, 552, or 582, or relative to the reference sequence corresponding to SEQ ID NO: 2, 4, 106, 218, 286, 396, 436, 520, 552, or 582.

[0052] In some embodiments, the amino acid sequence of the engineered RNA ligase comprises at least a substitution or substitution set as set forth in Tables 3, 4, 5, 6, 7.1, 7.2, 8, 9, 10, 11.3, 11.4, and 12, wherein the amino acid positions are relative to the reference sequence corresponding to residues 12 to 343 of SEQ ID NO: 2, 4, 106, 218, 286, 396, 436, 520, 552, or 582, or relative to the reference sequence corresponding to SEQ ID NO: 2, 4, 106, 218, 286, 396, 436, 520, 552, or 582.

[0053] In some embodiments, the engineered RNA ligase comprises an amino acid sequence having least 70%, 75%, 80%, 81%, 82%, 83%, 84%, 85%, 86%, 87%, 88%, 89%, 90%, 91%, 92%, 93%, 94%, 95%, 96%, 97%, 98%, 99%, or more sequence identity to a reference sequence comprising a substitution or substitution set of an RNA ligase variant set forth in Tables 3, 4, 5, 6, 7.1, 7.2, 8, 9, 10, 11.3, 11.4, and 12, wherein the amino acid positions are relative to the reference sequence corresponding to residues 12 to 343 of SEQ ID NO: 2, 4, 106, 218, 286, 396, 436, 520, 552, or 582, or relative to the reference sequence corresponding to SEQ ID NO: 4, 106, 218, 286, 396, 436, 520, 552, or 582.

[0054] In some embodiments, the engineered RNA ligase comprises an amino acid sequence comprising residues 12 to 343 of an even numbered SEQ ID NO. of SEQ ID NOs: 4-220, 224-252, and 270-958, or an amino acid sequence comprising an even numbered SEQ ID NO. of SEQ ID NOs: 4-220, 224-252, and 270-958.

[0055] In some embodiments, the engineered RNA ligase comprises an amino acid sequence comprising residues 12 to 343 of SEQ ID NO: 4, 106, 218, 286, 396, 436, 520, 552, or 582, or an amino acid sequence comprising SEQ ID NO: 4, 106, 218, 286, 396, 436, 520, 552, or 582.

[0056] In some embodiments, the engineered RNA ligase has RNA ligase activity and at least one improved property as compared to a reference RNA ligase. In some embodiments, the improved property of the engineered RNA ligase is selected from i) increased activity, ii) increased product yield, iii) increased product yield on polynucleotides with phosphorothioate internucleoside linkages, iv) increased product yield on oligonucleotides with 2′-modifications, and v) increased expression, or any combination of i), ii), iii), iv), and v), compared to a reference RNA ligase.

[0057] In some embodiments, the improved property of the engineered RNA ligase is in comparison to the reference RNA ligase having the sequence corresponding to residues 12 to 343 of SEQ ID NO: 2, 4, 106, 218, 286, 396, 436, 520, 552, or 582, or the sequence corresponding to SEQ ID NO: 2, 4, 106, 218, 286, 396, 436, 520, 552, or 582. In some embodiments, the reference RNA ligase has the sequence corresponding to residues 12 to 343 of SEQ ID NO: 2, or the sequence corresponding to SEQ ID NO: 2.

[0058] In some embodiments, the engineered RNA ligase comprises a fusion protein. In some embodiments, the engineered RNA ligase is fused to a tag or affinity polypeptide.

[0059] In some further embodiments, the engineered RNA ligase is purified. In some embodiments, the engineered RNA ligase is provided in solution, or is immobilized on a substrate, such as surfaces of solid substrates or membranes or particles.

[0060] In another aspect, the present disclosure provides a recombinant polynucleotide encoding any of the engineered RNA ligases disclosed herein.

[0061] In some embodiments, the recombinant polynucleotide comprises a polynucleotide sequence having at least 70%, 75%, 75%, 80%, 81%, 82%, 83%, 84%, 85%, 90%, 91%, 92%, 93%, 94%, 95%, 96%, 97%, 98%, 99%, or more sequence identity to a reference polynucleotide sequence corresponding to nucleotide residues 34 to 1029 of SEQ ID NO: 3, 105, 217, 285, 395, 435, 519, 551, or 581, or to a reference polynucleotide sequence corresponding to SEQ ID NO: 3, 105, 217, 285, 395, 435, 519, 551, or 581, wherein the recombinant polynucleotide encodes an RNA ligase.

[0062] In some embodiments, the recombinant polynucleotide comprises a polynucleotide sequence having at least 70%, 75%, 80%, 81%, 82%, 83%, 84%, 85%, 90%, 91%, 92%, 93%, 94%, 95%, 96%, 97%, 98%, 99%, or more sequence identity to a reference polynucleotide sequence corresponding to nucleotide residues 34 to 1029 of an odd numbered SEQ ID NO. of SEQ ID NOs: 3-219, 223-251, and 269-957, or to a reference polynucleotide sequence corresponding an odd numbered SEQ ID NO. of SEQ ID NOs: 3-219, 223-957, and 269-553, wherein the recombinant polynucleotide encodes an RNA ligase.

[0063] In some embodiments, the polynucleotide sequence of the recombinant polynucleotide encoding an engineered RNA ligase is codon optimized for expression in an organism or cell type thereof, for example a bacterial cell, fungal cell, or mammalian cell.

[0064] In some embodiments, the recombinant polynucleotide comprises a polynucleotide sequence comprising nucleotide residues 34 to 1029 of SEQ ID NO. 3, 105, 217, 285, 395, 435, 519, 551, or 581, or a polynucleotide sequence comprising SEQ ID NOs: 3, 105, 217, 285, 395, 435, 519, 551, or 581.

[0065] In some embodiments, the recombinant polynucleotide comprises a polynucleotide sequence comprising nucleotide residues 34 to 1029 of an odd numbered SEQ ID NO. of SEQ ID NOs: 3-219, 223-251, and 269-957, or a polynucleotide sequence comprising an odd numbered SEQ ID NO. of SEQ ID NOs: 3-219, 223-251, and 269-957.

[0066] In a further aspect, the present disclosure provides an expression vector comprising a recombinant polynucleotide provided herein encoding an engineered RNA ligase. In some embodiments, the recombinant polynucleotide of the expression vector is operably linked to a control sequence. In some embodiments, the control sequence comprises at least a promoter, particularly a heterologous promoter.

[0067] In another aspect, the present disclosure also provides a host cell comprising an expression vector provided herein. In some embodiments, the host cell is a prokaryotic cell or a eukaryotic cell. In some embodiments, the host cell is a bacterial cell, fungal cell, or mammalian cell. In some embodiments, the host cell is a bacterial cell, such as E. coli. or B. subtilis.

[0068] In a further aspect, the present disclosure provides a method of producing an engineered RNA ligase polypeptide, the method comprising culturing a host cell described herein under suitable culture conditions such that at least one engineered RNA ligase is produced. In some embodiments, the method further comprises recovering or isolating the engineered RNA ligase from the culture and/or host cells. In some embodiments, the method further comprises purifying the engineered RNA ligase.

[0069] In another aspect, the present disclosure provides a composition comprising an engineered RNA ligase disclosed herein. In some embodiments, the composition comprises at least a buffer. In some embodiments, the composition further comprises a nucleotide substrate (e.g., ATP or dATP) and one or more of polynucleotide ligase substrates.

[0070] In a further aspect, the present disclosure provides a method of ligating polynucleotide substrates, particularly double stranded polynucleotide substrates. In some embodiments, a method of ligating at least a first polynucleotide strand and a second polynucleotide strand, comprises contacting a first polynucleotide strand and a second polynucleotide strand with an engineered RNA ligase described herein in presence of a nucleotide substrate under conditions suitable for ligation of the first polynucleotide strand to the second polynucleotide strand, wherein the first polynucleotide strand comprises a ligatable 5′-end and the second polynucleotide strand comprises a 3′-end ligatable to the 5-end of the first polynucleotide strand. In some embodiments, the first polynucleotide strand and/or second polynucleotide strand comprises RNA or a mixture of RNA and DNA.

[0071] In some embodiments, the method further comprises a third polynucleotide strand, wherein the first polynucleotide strand and second polynucleotide strand hybridize adjacent to one another on the third polynucleotide to position the 5′-end of the first polynucleotide strand adjacent to the 3′-end of the second polynucleotide strand to form a ligatable nick. In some embodiments, the third polynucleotide strand is continuous with the first polynucleotide strand or second polynucleotide strand. In some embodiments, the third polynucleotide strand is continuous with the first polynucleotide strand and second polynucleotide strand to form a single continuous polynucleotide ligase substrate. In some embodiments, 3′-end region of the second polynucleotide strand that hybridizes to the third polynucleotide strand is at least 4, 6, 8 or more base pairs in length. In some embodiments, the 5-end region of the first polynucleotide strand that hybridizes to the third polynucleotide strand is at least 2, 3, 4, 6, 8 or more base pairs in length.

[0072] In some embodiments of the method, the third polynucleotide strand comprises a splint or bridging polynucleotide, wherein the 5′-terminal sequence of the first polynucleotide strand and the 3′-terminal sequence of the second polynucleotide strand hybridize adjacent to one another on the splint or bridging polynucleotide to position the 5′-end of the first polynucleotide strand adjacent to the 3′-end of the second polynucleotide strand.

[0073] In some embodiments, the first polynucleotide strand is hybridized to the third polynucleotide strand to form a first double stranded fragment, and the second polynucleotide strand is hybridized to a fourth polynucleotide strand to form a second double stranded fragment, where the first and second double stranded fragments have complementary ends that can base pair to form a substrate for the engineered RNA ligase. In some embodiments, the first double stranded fragment and the second double stranded fragment have complementary overhangs or complementary single stranded ends that can base pair and form double stranded nick that serves as a substrate for the engineered RNA ligase.

[0074] In some embodiments of the method, at least 2, 3, 4, 5, or 6 or more double stranded fragments, where each double stranded fragment has a complementary end that can base pair with at least one other double stranded fragment with a complementary end is used as substrates for the RNA ligase.

[0075] In some embodiments, the polynucleotide substrate comprises one or more modified nucleotides. In some embodiments, the modification comprises a modified sugar residue, a modified nucleobase, and/or modified phosphate group. In some embodiments, the modified sugar residue is modified at the 2-position of the sugar moiety. In some embodiments, the modified 2-position is a 2′-halo or 2′-O-alkyl, preferably a lower alkyl, e.g., methyl or ethyl. In some embodiments, the modified nucleotide is a modified phosphate group, for example a phosphorothioate group. In some embodiments, the modified phosphate group is at the 5′-end of a polynucleotide substrate. In some embodiments, the modified phosphate group is at an internucleoside linkage of the polynucleotide substrate. In some embodiments, the modified nucleotide has a modified nucleobase. In some embodiments, the polynucleotide substrate includes an inverted nucleotide (e.g., 5′-5′ or 3′-3′ inverted linkage). In some embodiments, the modified nucleotide is modified with a cell targeting moiety, such as a GalNac or lipid (e.g., cholesterol). In some embodiments, the modified nucleotide is modified with a linker moiety. In some embodiments, modification with the cell-targeting or linker moiety is on the nucleobase or the sugar residue. In some embodiments, the cell-targeting or linker moiety is attached to the 5′ or 3′ end of the polynucleotide substrate.

[0076] In some embodiments, the engineered RNA ligase is used in a method to synthesize RNA or DNA/RNA polynucleotides by ligation of shorter RNA or DNA/RNA oligonucleotides. In some embodiments, the engineered RNA ligase is used to ligate the 3′ OH of RNA to the 5′ phosphate of DNA or RNA. In some embodiments, the engineered RNA ligase is used to ligate the 3′ OH of RNA to the 5′ phosphate of DNA in a double-stranded-format NGS RNA library construction. In some embodiments, the engineered RNA ligase is used in a method of preparing RNA rings. In some embodiments, the engineered RNA ligase is used to repair nicks in dsRNA or dsRNA/DNA. In some embodiments, the engineered RNA ligase is used to synthesize modified RNA oligonucleotides.

[0077] In a further aspect, the present disclosure also provides a kit comprising at least one engineered RNA ligase disclosed herein. In some embodiments, the kits further comprises one or more of a buffer, nucleotide substrate (e.g., ATP or dATP), and/or one or more polynucleotide ligase substrates.

### DETAILED DESCRIPTION

[0078] The present disclosure provides engineered RNA ligase polypeptides and compositions thereof, as well as polynucleotides encoding the engineered RNA ligase polypeptides. The disclosure also provides methods of using of the engineered RNA ligase polypeptides and compositions thereof for molecular biological, diagnostic, and other purposes. In some embodiments, the engineered RNA ligase polypeptides display, among others, increased activity, increased stability, increased thermal stability, and/or increased activity on polynucleotides containing one or more modified nucleotides or nucleotide analogs.

### Abbreviations and Definitions

[0079] In reference to the present invention, the technical and scientific terms used in the descriptions herein will have the meanings commonly understood by one of ordinary skill in the art, unless specifically defined otherwise. Accordingly, the following terms are intended to have the following meanings and are to be more fully described by reference to the application as a whole.

[0080] As used herein, the singular forms “a”, “an” and “the” include plural referents unless the context clearly indicates otherwise. Thus, for example, reference to “a polypeptide” includes more than one polypeptide.

[0081] Similarly, “comprise,” “comprises,” “comprising” “include,” “includes,” and “including” are interchangeable and not intended to be limiting. Thus, as used herein, the term “comprising” and its cognates are used in their inclusive sense (i.e., equivalent to the term “including” and its corresponding cognates).

[0082] It is to be further understood that where descriptions of various embodiments use the term “comprising,” those skilled in the art would understand that in some specific instances, an embodiment can be alternatively described using language “consisting essentially of” or “consisting of.”

[0083] Moreover, numeric ranges are inclusive of the numbers defining the range. Thus, every numerical range disclosed herein is intended to encompass every narrower numerical range that falls within such broader numerical range, as if such narrower numerical ranges were all expressly written herein. It is also intended that every maximum (or minimum) numerical limitation disclosed herein includes every lower (or higher) numerical limitation, as if such lower (or higher) numerical limitations were expressly written herein.

[0084] As used herein, the term “about” means an acceptable error for a particular value. In some instances, “about” means within 0.05%, 0.5%, 1.0%, or 2.0%, of a given value range. In some instances, “about” means within 1, 2, 3, or 4 standard deviations of a given value.

[0085] Furthermore, the headings provided herein are not limitations of the various aspects or embodiments of the invention which can be had by reference to the application as a whole. Accordingly, the terms defined immediately below are more fully defined by reference to the application as a whole.

[0086] “EC” number refers to the Enzyme Nomenclature of the Nomenclature Committee of the International Union of Biochemistry and Molecular Biology (NC-IUBMB). The IUBMB biochemical classification is a numerical classification system for enzymes based on the chemical reactions they catalyze.

[0087] “ATCC” refers to the American Type Culture Collection whose biorepository collection includes genes and strains.

[0088] “NCBI” refers to National Center for Biological Information and the sequence databases provided therein.

[0089] “RNA ligase” refers to enzymes that covalently joins the 5′-phosphoryl termini of RNA or DNA to the 3′-hydroxyl termini of RNA or DNA. Two families of RNA ligases are known to occur in nature. RNA ligase 1 catalyzes the covalent joining of single stranded 5′-phosphoryl termini of RNA or DNA to single stranded 3-hydroxyl termini of RNA or DNA. RNA ligase 2 also catalyzes the covalent joining of a 3′-hydroxyl terminus of RNA to a 5′-phosphorylated RNA or DNA but shows preference for double stranded substrates. RNA ligases include those enzymes classified as EC 6.5.1.3.

[0090] Although some DNA ligases are capable of acting on either DNA or RNA as the 3′-hydroxyl strand substrate, an RNA ligase 2 acting at a duplex nick preferentially acts on 3′-hydroxyl strand of RNA but is agnostic to whether 5-phosphoryl strand is DNA or RNA. Moreover, in some embodiments, the strand with the 3′-hydroxyl may include deoxyribonucleotides if sufficient number of ribonucleotides are present at the 3′-hydroxyl terminus. For example, the RNA specificity of T4 RNA ligase 2 is affected by the 3′-hydroxyl strand, and specifically by the two terminal ribonucleotides of the 3-′hydroxyl side of the nick (see, e.g., Nandakumar et al., Mol. Cell., 2004, 16:211-221). It is to be understood that the ligation reaction is not limited to naturally occurring RNA and DNA substrates also includes polynucleotide substrates that contain modified nucleotides and/or nucleotide analogs.

[0091] “Protein,” “polypeptide,” and “peptide” are used interchangeably to denote a polymer of at least two amino acids covalently linked by an amide bond, regardless of length or post-translational modification (e.g., glycosylation or phosphorylation).

[0092] “Amino acids” are referred to herein by either their commonly known three-letter symbols or by the one-letter symbols recommended by IUPAC-IUB Biochemical Nomenclature Commission. Nucleotides, likewise, may be referred to by their commonly accepted single letter codes. The abbreviations used for the genetically encoded amino acids are conventional and are as follows: alanine (Ala or A), arginine (Arg or R), asparagine (Asn or N), aspartate (Asp or D), cysteine (Cys or C), glutamate (Glu or E), glycine (Gly or G), glutamine (Gln or Q), histidine (His or H), isoleucine (Ile or I), leucine (Leu or L), lysine (Lys or K), methionine (Met or M), phenylalanine (Phe or F), proline (Pro or P), serine (Ser or S), threonine (Thr or T), tryptophan (Trp or W), tyrosine (Tyr or Y), and valine (Val or V). When the three-letter abbreviations are used, unless specifically preceded by an “L” or a “D” or clear from the context in which the abbreviation is used, the amino acid may be in either the L- or D-configuration about α-carbon (C_{α}). For example, whereas “Ala” designates alanine without specifying the configuration about the α-carbon, “D-Ala” and “L-Ala” designate D-alanine and L-alanine, respectively. When the one-letter abbreviations are used, upper case letters designate amino acids in the L-configuration about the α-carbon and lower case letters designate amino acids in the D-configuration about the α-carbon. For example, “A” designates L-alanine and “a” designates D-alanine. When polypeptide sequences are presented as a string of one-letter or three-letter abbreviations (or mixtures thereof), the sequences are presented in the amino (N) to carboxy (C) direction in accordance with common convention.

[0093] “Fusion protein,” and “chimeric protein” and “chimera” refer to hybrid proteins created through the joining of two or more polynucleotides that originally encode separate proteins. In some embodiments, fusion proteins are created by recombinant technology (e.g., molecular biology techniques known in the art).

[0094] “Polynucleotide,” “nucleic acid,” or “oligonucleotide” is used herein to denote a polymer comprising at least two nucleotides where the nucleotides are either deoxyribonucleotides or ribonucleotides or mixtures of deoxyribonucleotides and ribonucleotides. In some embodiments, the abbreviations used for genetically encoding nucleosides are conventional and are as follow: adenosine (A); guanosine (G); cytidine (C); thymidine (T); and uridine (U). Unless specifically delineated, the abbreviated nucleosides may be either ribonucleosides or 2′-deoxyribonucleosides. The nucleosides may be specified as being either ribonucleosides or 2′-deoxyribonucleosides on an individual basis or on an aggregate basis. When a polynucleotide, nucleic acid, or oligonucleotide sequences are presented as a string of one-letter abbreviations, the sequences are presented in the 5′ to 3′ direction in accordance with common convention, and the phosphates are not indicated. The term “DNA” refers to deoxyribonucleic acid. The term “RNA” refers to ribonucleic acid. The polynucleotide or nucleic acid may be single-stranded or double-stranded, or may include both single-stranded regions and double-stranded regions.

[0095] The terms “polynucleotide,” “nucleic acid” and “oligonucleotide” in some embodiments encompass polynucleotide or nucleic acid or oligonucleotide analogs, which include, among others, nucleosides linked together via other than standard phosphodiester linkages, such as non-standard linkages of phosphoramidates, phosphorothioates, amide linkages, etc.; nucleosides/nucleotides with non-standard nucleobases, including modified and/or synthetic nucleobases, for example inosine, xanthine, hypoxanthine, etc.; nucleosides with modified sugar residues, such as 2′-O-alkyl, 2′-halo, 2,3-dideoxy, 2′-halo-2′deoxy, β-D-ribo LNA, α-L-ribo-LNA (locked nucleic acids), etc.; and/or 5′-phosphate analogs, including, among others, phosphorothioate, phosphoacetate, phosphoramidate, monomethylphosphate, methylphosphonate, or phosphonocarboxylate.

[0096] “Duplex” and “ds” refer to a double-stranded nucleic acid (e.g., DNA or RNA) molecule comprised of two single-stranded polynucleotides that are complementary in their sequence (e.g., A pairs to T or U, C pairs to G), arranged in an antiparallel 5′ to 3′ orientation, and held together by hydrogen bonds between the nucleobases (e.g., adenine [A], guanine [G], cytosine [C], thymine [T], uridine [U]). In some embodiments, the duplex or double stranded nucleic acid is formed using modified nucleobases or nucleobase analogs.

[0097] “Complementary” is used herein to describe the structural relationship between nucleotide bases that are capable of forming base pairs with one another. For example, a purine nucleotide base present on a polynucleotide that is complementary to a pyrimidine nucleotide base on a polynucleotide may base pair by forming hydrogen bonds with one another. Complementary nucleotide bases can base pair via Watson/Crick base pairing or in any other manner than forms stable duplexes or other nucleic acid structures.

[0098] “Watson/Crick Base-Pairing” refers to a pattern of specific pairs of nucleobases and analogs that bind together through sequence-specific hydrogen-bonds, e.g., A pairs with T or U, and G pairs with C.

[0099] “Annealing” or “Hybridization” refers to the base-pairing interactions of one nucleobase polymer (e.g., poly- and oligonucleotides) with another that results in the formation of a double-stranded structure, a triplex structure or a quaternary structure. Annealing or hybridization can occur via Watson-Crick base-pairing interactions, but may be mediated by other hydrogen-bonding interactions, such as Hoogsteen base pairing. In some embodiments, the nucleobase polymer that anneals or hybridizes to another is a single nucleobase polymer while in other embodiments, the nucleobase polymers are separate nucleobase polymers.

[0100] “Engineered,” “recombinant,” “non-naturally occurring,” and “variant,” when used with reference to a cell, a polynucleotide or a polypeptide refer to a material or a material corresponding to the natural or native form of the material that has been modified in a manner that would not otherwise exist in nature or is identical thereto but produced or derived from synthetic materials and/or by manipulation using recombinant techniques.

[0101] “Wild-type” and “naturally-occurring” refer to the form found in nature. For example, a wild-type polypeptide or polynucleotide sequence is a sequence present in an organism that can be isolated from a source in nature and which has not been intentionally modified by human manipulation.

[0102] “Coding sequence” refers to that part of a nucleic acid (e.g., a gene) that encodes an amino acid sequence of a protein.

[0103] “Percent (%) sequence identity” refers to comparisons among polynucleotides and polypeptides, and are determined by comparing two optimally aligned sequences over a comparison window, wherein the portion of the polynucleotide or polypeptide sequence in the comparison window may comprise additions or deletions (i.e., gaps) as compared to the reference sequence for optimal alignment of the two sequences. The percentage may be calculated by determining the number of positions at which the identical nucleic acid base or amino acid residue occurs in both sequences to yield the number of matched positions, dividing the number of matched positions by the total number of positions in the window of comparison and multiplying the result by 100 to yield the percentage of sequence identity. Alternatively, the percentage may be calculated by determining the number of positions at which either the identical nucleic acid base or amino acid residue occurs in both sequences or a nucleic acid base or amino acid residue is aligned with a gap to yield the number of matched positions, dividing the number of matched positions by the total number of positions in the window of comparison and multiplying the result by 100 to yield the percentage of sequence identity. Those of skill in the art appreciate that there are many established algorithms available to align two sequences. Optimal alignment of sequences for comparison can be conducted, e.g., by the local homology algorithm of Smith and Waterman (Smith and Waterman, Adv. Appl. Math., 1981, 2:482), by the homology alignment algorithm of Needleman and Wunsch (Needleman and Wunsch, J. Mol. Biol., 1970, 48:443), by the search for similarity method of Pearson and Lipman (Pearson and Lipman, Proc. Natl. Acad. Sci. USA, 1988, 85:2444), by computerized implementations of these algorithms (e.g., GAP, BESTFIT, FASTA, and TFASTA in the GCG Wisconsin Software Package), or by visual inspection, as known in the art. Examples of algorithms that are suitable for determining percent sequence identity and sequence similarity include, but are not limited to the BLAST and BLAST 2.0 algorithms (see, e.g., Altschul et al., J. Mol. Biol., 1990, 215:403-410; and Altschul et al., Nucleic Acids Res., 1977, 3389-3402). Software for performing BLAST analyses is publicly available through the National Center for Biotechnology Information website. This algorithm involves first identifying high scoring sequence pairs (HSPs) by identifying short words of length “W” in the query sequence, which either match or satisfy some positive-valued threshold score “T,” when aligned with a word of the same length in a database sequence. T is referred to as the neighborhood word score threshold (see Altschul et al, supra). These initial neighborhood word hits act as seeds for initiating searches to find longer HSPs containing them. The word hits are then extended in both directions along each sequence for as far as the cumulative alignment score can be increased. Cumulative scores are calculated using, for nucleotide sequences, the parameters “M” (reward score for a pair of matching residues; always >0) and “N” (penalty score for mismatching residues; always <0). For amino acid sequences, a scoring matrix is used to calculate the cumulative score. Extension of the word hits in each direction are halted when: the cumulative alignment score falls off by the quantity “X” from its maximum achieved value; the cumulative score goes to zero or below, due to the accumulation of one or more negative-scoring residue alignments; or the end of either sequence is reached. The BLAST algorithm parameters W, T, and X determine the sensitivity and speed of the alignment. The BLASTN program (for nucleotide sequences) uses as defaults a wordlength (W) of 11, an expectation (E) of 10, M=5, N=−4, and a comparison of both strands. For amino acid sequences, the BLASTP program uses as defaults a wordlength (W) of 3, an expectation (E) of 10, and the BLOSUM62 scoring matrix (see, e.g., Henikoff and Henikoff, Proc. Natl. Acad. Sci. USA, 1989, 89:10915). Exemplary determination of sequence alignment and % sequence identity can employ the BESTFIT or GAP programs in the GCG Wisconsin Software package (Accelrys, Madison WI), using default parameters provided.

[0104] “Reference sequence” refers to a defined sequence used as a basis for a sequence comparison. A reference sequence may be a subset of a larger sequence, for example, a segment of a full-length gene or polypeptide sequence. Generally, a reference sequence is at least 20 nucleotide or amino acid residues in length, at least 25 residues in length, at least 50 residues in length, at least 100 residues in length or the full length of the nucleic acid or polypeptide. Since two polynucleotides or polypeptides may each (1) comprise a sequence (i.e., a portion of the complete sequence) that is similar between the two sequences, and (2) may further comprise a sequence that is divergent between the two sequences, sequence comparisons between two (or more) polynucleotides or polypeptide are typically performed by comparing sequences of the two polynucleotides or polypeptides over a “comparison window” to identify and compare local regions of sequence similarity. In some embodiments, a “reference sequence” can be based on a primary amino acid sequence, where the reference sequence is a sequence that can have one or more changes in the primary sequence. For instance, the phrase “a reference sequence corresponding to SEQ ID NO: 14, having a leucine at the residue corresponding to X14” (or “a reference sequence corresponding to SEQ ID NO: 14, having a lysine at the residue corresponding to position 14”) refers to a reference sequence in which the corresponding residue at position X14 in SEQ ID NO: 14 (e.g., an alanine), has been changed to lysine.

[0105] “Comparison window” refers to a conceptual segment of contiguous nucleotide positions or amino acids residues wherein a sequence may be compared to a reference sequence. In some embodiments, the comparison window is at least 15 to 20 contiguous nucleotides or amino acids and wherein the portion of the sequence in the comparison window may comprise additions or deletions (i.e., gaps) of 20 percent or less as compared to the reference sequence (which does not comprise additions or deletions) for optimal alignment of the two sequences. In some embodiments, the comparison window can be longer than 15-20 contiguous residues, and includes, optionally 30, 40, 50, 100, or longer windows.

[0106] “Corresponding to”, “reference to,” and “relative to” when used in the context of the numbering of a given amino acid or polynucleotide sequence refer to the numbering of the residues of a specified reference sequence when the given amino acid or polynucleotide sequence is compared to the reference sequence. In other words, the residue number or residue position of a given polymer is designated with respect to the reference sequence rather than by the actual numerical position of the residue within the given amino acid or polynucleotide sequence. For example, a given amino acid sequence, such as that of an engineered RNA ligase, can be aligned to a reference sequence by introducing gaps to optimize residue matches between the two sequences. In these cases, although the gaps are present, the numbering of the residue in the given amino acid or polynucleotide sequence is made with respect to the reference sequence to which it has been aligned. In some embodiments, the sequence is tagged (e.g., with a histidine tag).

[0107] “Mutation” refers to the alteration of a nucleic acid sequence. In some embodiments, mutations result in changes to the encoded polypeptide sequence (i.e., as compared to the original sequence without the mutation). In some embodiments, the mutation comprises a substitution, such that a different amino acid is produced. In some alternative embodiments, the mutation comprises an addition, such that an amino acid is added (e.g., insertion) to the original polypeptide sequence. In some further embodiments, the mutation comprises a deletion, such that an amino acid is deleted from the original polypeptide sequence. Any number of mutations may be present in a given sequence.

[0108] “Amino acid difference” and “residue difference” refer to a difference in the amino acid residue at a position of a polypeptide sequence relative to the amino acid residue at a corresponding position in a reference sequence. The positions of amino acid differences generally are referred to herein as “Xn,” where n refers to the corresponding position in the reference sequence upon which the residue difference is based. For example, a “residue difference at position X17 as compared to SEQ ID NO: 2” (or a “residue difference at position 17 as compared to SEQ ID NO: 2”) refers to a difference of the amino acid residue at the polypeptide position corresponding to position 17 of SEQ ID NO: 2. Thus, if the reference polypeptide of SEQ ID NO: 2 has a serine at position 17, then a “residue difference at position X17 as compared to SEQ ID NO: 2” refers to an amino acid substitution of any residue other than serine at the position of the polypeptide corresponding to position 17 of SEQ ID NO: 2. In some instances herein, the specific amino acid residue difference at a position is indicated as “XnY” where “Xn” specified the corresponding residue and position of the reference polypeptide (as described above), and “Y” is the single letter identifier of the amino acid found in the engineered polypeptide (i.e., the different residue than in the reference polypeptide). In some instances (e.g., in the Tables in the Examples), the present disclosure also provides specific amino acid differences denoted by the conventional notation “AnB”, where A is the single letter identifier of the residue in the reference sequence, “n” is the number of the residue position in the reference sequence, and B is the single letter identifier of the residue substitution in the sequence of the engineered polypeptide. In some instances, an amino acid residue difference or substitution may be a deletion and may be denoted by a “−”. In some embodiments, the amino acid difference, e.g., a substitution, is denoted by the abbreviation “nB,” without the identifier for the residue in the reference sequence. In some embodiments, the phrase “an amino acid residue nB” denotes the presence of the amino residue in the engineered polypeptide, which may or may not be a substitution in context of a reference polypeptide or amino acid sequence.

[0109] In some instances, a polypeptide of the present disclosure can include one or more amino acid residue differences relative to a reference sequence, which is indicated by a list of the specified positions where residue differences are present relative to the reference sequence. In some embodiments, where more than one amino acid can be used in a specific residue position of a polypeptide, the various amino acid residues that can be used are separated by a “/” (e.g., T33A/T33K, T33A/K, or 33A/K).

[0110] “Amino acid substitution set” and “substitution set” refers to a group of amino acid substitutions within a polypeptide sequence. In some embodiments, substitution sets comprise 2, 3, 4, 5, 6, 7, 8, 9, 10, 11, 12, 13, 14, 15, or more amino acid substitutions. In some embodiments, a substitution set refers to the set of amino acid substitutions that is present in any of the variant RNA ligase polypeptides listed in any of the Tables in the Examples. In these substitution sets, the individual substitutions are separated by a semicolon (“;”; e.g., N141T; A184P) or slash (“/”; e.g., N141T/A184P or 141T/184P).

[0111] “Conservative amino acid substitution” refers to a substitution of a residue with a different residue having a similar side chain, and thus typically involves substitution of the amino acid in the polypeptide with amino acids within the same or similar defined class of amino acids. By way of example and not limitation, an amino acid with an aliphatic side chain may be substituted with another aliphatic amino acid (e.g., alanine, valine, leucine, and isoleucine); an amino acid with hydroxyl side chain is substituted with another amino acid with a hydroxyl side chain (e.g., serine and threonine); an amino acids having aromatic side chains is substituted with another amino acid having an aromatic side chain (e.g., phenylalanine, tyrosine, tryptophan, and histidine); an amino acid with a basic side chain is substituted with another amino acid with a basis side chain (e.g., lysine and arginine); an amino acid with an acidic side chain is substituted with another amino acid with an acidic side chain (e.g., aspartic acid or glutamic acid); and a hydrophobic or hydrophilic amino acid is replaced with another hydrophobic or hydrophilic amino acid, respectively.

[0112] “Non-conservative substitution” refers to substitution of an amino acid in the polypeptide with an amino acid with significantly differing side chain properties. Non-conservative substitutions may use amino acids between, rather than within, the defined groups and affect: (a) the structure of the peptide backbone in the area of the substitution (e.g., proline for glycine); (b) the charge or hydrophobicity; and/or (c) the bulk of the side chain. By way of example and not limitation, exemplary non-conservative substitutions include an acidic amino acid substituted with a basic or aliphatic amino acid; an aromatic amino acid substituted with a small amino acid; and a hydrophilic amino acid substituted with a hydrophobic amino acid.

[0113] “Deletion” refers to modification to the polypeptide by removal of one or more amino acids from the reference polypeptide. Deletions can comprise removal of 1 or more amino acids, 2 or more amino acids, 5 or more amino acids, 10 or more amino acids, 15 or more amino acids, or 20 or more amino acids, up to 10% of the total number of amino acids, or up to 20% of the total number of amino acids making up the reference enzyme while retaining enzymatic activity and/or retaining the improved properties of an engineered RNA ligase. Deletions can be directed to the internal portions and/or terminal portions of the polypeptide. In various embodiments, the deletion can comprise a continuous segment or can be discontinuous. Deletions are indicated by “−”, and may be present in substitution sets.

[0114] “Insertion” refers to modification to the polypeptide by addition of one or more amino acids from the reference polypeptide. Insertions can be in the internal portions of the polypeptide, or to the carboxy or amino terminus. Insertions as used herein include fusion proteins as is known in the art. The insertion can be a contiguous segment of amino acids or separated by one or more of the amino acids in the naturally occurring polypeptide.

[0115] “Functional fragment” and “biologically active fragment” are used interchangeably herein, to refer to a polypeptide that has an amino-terminal and/or carboxy-terminal deletion(s) and/or internal deletions, but where the remaining amino acid sequence is identical to the corresponding positions in the sequence to which it is being compared (e.g., a full length engineered RNA ligase of the present invention) and that retains substantially all of the activity of the full-length polypeptide.

[0116] “Isolated polypeptide” refers to a polypeptide which is substantially separated from other contaminants that naturally accompany it (e.g., protein, lipids, and polynucleotides). The term embraces polypeptides which have been removed or purified from their naturally-occurring environment or expression system (e.g., host cell or in vitro synthesis). The recombinant RNA ligase polypeptides may be present within a cell, present in the cellular medium, or prepared in various forms, such as lysates or isolated preparations. As such, in some embodiments, the recombinant RNA ligase polypeptides provided herein are isolated polypeptides.

[0117] “Substantially pure polypeptide” refers to a composition in which the polypeptide species is the predominant species present (i.e., on a molar or weight basis it is more abundant than any other individual macromolecular species in the composition), and is generally a substantially purified composition when the object species comprises at least about 50 percent of the macromolecular species present by mole or % weight. Generally, a substantially pure RNA ligase composition will comprise about 60% or more, about 70% or more, about 80% or more, about 90% or more, about 95% or more, and about 98% or more of all macromolecular species by mole or % weight present in the composition. In some embodiments, the object species is purified to essential homogeneity (i.e., contaminant species cannot be detected in the composition by conventional detection methods) wherein the composition consists essentially of a single macromolecular species. Solvent species, small molecules (<500 Daltons), and elemental ion species are not considered macromolecular species. In some embodiments, the isolated recombinant RNA ligase polypeptides are substantially pure polypeptide compositions.

[0118] “Improved enzyme property” refers to an engineered RNA ligase polypeptide that exhibits an improvement in any enzyme property as compared to a reference RNA ligase polypeptide, such as a wild-type RNA ligase polypeptide or another engineered RNA ligase polypeptide. Improved properties include but are not limited to such properties as increased protein expression, increased thermoactivity, increased thermostability, increased stability, increased enzymatic activity, increased substrate specificity and/or affinity, increased substrate range, increased specific activity, increased resistance to substrate and/or end-product inhibition, increased chemical stability, improved solvent stability, increased solubility, and increased inhibitor resistance or tolerance.

[0119] “Increased enzymatic activity” and “enhanced catalytic activity” refer to an improved property of the engineered RNA ligase polypeptides, which can be represented by an increase in specific activity (e.g., product produced/time/weight protein) and/or an increase in percent conversion of the substrate to the product (e.g., percent conversion of starting amount of substrate to product in a specified time period using a specified amount of RNA ligase) as compared to the reference RNA ligase enzyme (e.g., wild-type RNA ligase and/or another engineered RNA ligase). Exemplary methods to determine enzyme activity are provided in the Examples. Any property relating to enzyme activity may be affected, including the classical enzyme properties of Kₘ, Vₘₐₓ or k_{cat}, changes of which can lead to increased enzymatic activity. Improvements in enzyme activity can be from about 1.1 fold the enzymatic activity of the corresponding wild-type enzyme, to about 1.5 fold, 2-fold, 5-fold, 10-fold, 20-fold, 25-fold, 50-fold, 75-fold, 100-fold, 150-fold, 200-fold or more enzymatic activity than the naturally occurring RNA ligase or another engineered RNA ligase from which the RNA ligase polypeptides were derived.

[0120] “Hybridization stringency” relates to hybridization conditions, such as washing conditions, in the hybridization of nucleic acids. Generally, hybridization reactions are performed under conditions of lower stringency, followed by washes of varying but higher stringency (see, e.g., Sambrook et al., Molecular Cloning: A Laboratory Manual, Cold Spring Harbor Laboratory Press, New York, 2001; Ausubel et al., Current Protocols in Molecular Biology, John Wiley & Sons, 2003). The term “moderately stringent hybridization” refers to conditions that permit target-DNA to bind a complementary nucleic acid that has about 60% identity, preferably about 75% identity, about 85% identity to the target DNA, with greater than about 90% identity to target-polynucleotide. Exemplary moderately stringent conditions are conditions equivalent to hybridization in 50% formamide, 5× Denhart's solution, 5×SSPE, 0.2% SDS at 42° C., followed by washing in 0.2×SSPE, 0.2% SDS, at 42° C. “High stringency hybridization” refers generally to conditions that are about 10° C. or less from the thermal melting temperature Tₘ as determined under the solution condition for a defined polynucleotide sequence. In some embodiments, a high stringency condition refers to conditions that permit hybridization of only those nucleic acid sequences that form stable hybrids in 0.018M NaCl at 65° C. (i.e., if a hybrid is not stable in 0.018M NaCl at 65° C., it will not be stable under high stringency conditions, as contemplated herein). High stringency conditions can be provided, for example, by hybridization in conditions equivalent to 50% formamide, 5× Denhart's solution, 5×SSPE, 0.2% SDS at 42° C., followed by washing in 0.1×SSPE, and 0.1% SDS at 65° C. Another high stringency condition comprises hybridizing in conditions equivalent to hybridizing in 5×SSC containing 0.1% (w:v) SDS at 65° C. and washing in 0.1×SSC containing 0.1% SDS at 65° C. Other high stringency hybridization conditions, as well as moderately stringent conditions, are described in the references cited above.

[0121] “Codon optimized” refers to changes in the codons of the polynucleotide encoding a protein to those preferentially used in a particular organism such that the encoded protein is more efficiently expressed in that organism. Although the genetic code is degenerate, in that most amino acids are represented by several codons, called “synonyms” or “synonymous” codons, it is well known that codon usage by particular organisms is nonrandom and biased towards particular codon triplets. This codon usage bias may be higher in reference to a given gene, genes of common function or ancestral origin, highly expressed proteins versus low copy number proteins, and the aggregate protein coding regions of an organism's genome. In some embodiments, the polynucleotides encoding the RNA ligase enzymes are codon optimized for optimal production from the host organism selected for expression.

[0122] “Control sequence” refers herein to include all components that are necessary or advantageous for the expression of a polynucleotide and/or polypeptide of the present disclosure. Each control sequence may be native or foreign to the nucleic acid sequence encoding the polypeptide. Such control sequences include, but are not limited to, leaders, polyadenylation sequences, propeptide sequences, promoter sequences, signal peptide sequences, initiation sequences, and transcription terminators. At a minimum, the control sequences include a promoter, and transcriptional and translational stop signals. In some embodiments, the control sequences are provided with linkers for the purpose of introducing specific restriction sites facilitating ligation of the control sequences with the coding region of the nucleic acid sequence encoding a polypeptide.

[0123] “Operably linked” or “operatively linked” refers to a configuration in which a control sequence is appropriately placed (i.e., in a functional relationship) at a position relative to a polynucleotide of interest such that the control sequence directs or regulates the expression of the polynucleotide encoding a polypeptide of interest.

[0124] “Promoter” or “promoter sequence” refers to a nucleic acid sequence that is recognized by a host cell for expression of a polynucleotide of interest, such as a coding sequence. The promoter sequence contains transcriptional control sequences that mediate the expression of a polynucleotide of interest. The promoter may be any nucleic acid sequence which shows transcriptional activity in the host cell of choice including mutant, truncated, and hybrid promoters, and may be obtained from genes encoding extracellular or intracellular polypeptides either homologous or heterologous to the host cell.

[0125] “Suitable reaction conditions” or “suitable conditions” refers to those conditions in the enzymatic conversion reaction solution (e.g., ranges of enzyme loading, substrate loading, temperature, pH, buffers, co-solvents, etc.) under which an RNA ligase polypeptide of the present disclosure is capable of converting a polynucleotide(s) substrate to the desired ligated product polynucleotide. Exemplary “suitable reaction conditions” are provided herein (see, the Examples).

[0126] “Product” in the context of an enzymatic conversion process refers to the compound or molecule resulting from the action of the RNA ligase polypeptide on the substrate.

[0127] “Culturing” refers to the growing of a population of microbial cells under suitable conditions using any suitable medium (e.g., liquid, gel, or solid).

[0128] “Vector” is a recombinant construct for introducing a polynucleotide of interest into a cell. In some embodiments, the vector is an expression vector that is operably linked to a suitable control sequence capable of effecting the expression in a suitable host of the polynucleotide or a polypeptide encoded in the polynucleotide. In some embodiments, an “expression vector” has a promoter sequence operably linked to the polynucleotide (e.g., transgene) to drive expression in a host cell, and in some embodiments, also comprises a transcription terminator sequence.

[0129] “Expression” includes any step involved in the production of the polypeptide including, but not limited to, transcription, post-transcriptional modification, translation, and post-translational modification. In some embodiments, the term also encompasses secretion of the polypeptide from a cell.

[0130] “Produces” refers to the production of proteins and/or other compounds by cells. It is intended that the term encompass any step involved in the production of polypeptides including, but not limited to, transcription, post-transcriptional modification, translation, and post-translational modification. In some embodiments, the term also encompasses secretion of the polypeptide from a cell.

[0131] “Heterologous” or “recombinant” refers to the relationship between two or more nucleic acid or polypeptide sequences (e.g., a promoter sequence, signal peptide, terminator sequence, etc.) that are derived from different sources and are not associated in nature.

[0132] “Host cell” and “host strain” refer to suitable hosts for expression vectors comprising a polynucleotide provided herein (e.g., a polynucleotide sequences encoding at least one RNA ligase variant). In some embodiments, the host cells are prokaryotic or eukaryotic cells that have been transformed or transfected with vectors constructed using recombinant DNA techniques as known in the art.

### Engineered RNA Ligase Polypeptides

[0133] In one aspect, the present disclosure provides RNA ligases, including engineered RNA ligase polypeptide variants. In some embodiments, the RNA ligase and engineered RNA ligase polypeptide variants are useful for ligating polynucleotide substrates, such as for preparing polynucleotides from short oligonucleotides, and for diagnostic and other purposes. The engineered RNA ligase variants can be used in solution, as well as in immobilized embodiments. In some embodiments, the engineered RNA ligase can be prepared and used as non-fusion polypeptides or as fusion polypeptides.

[0134] In some embodiments, the engineered RNA ligase, or functional fragment thereof, comprises an amino acid sequence having at least 70%, 75%, 80%, 81%, 82%, 83%, 84%, 85%, 86%, 87%, 88%, 89%, 90%, 91%, 92%, 93%, 94%, 95%, 96%, 97%, 98%, 99%, or more sequence identity to a reference sequence corresponding to residues 12 to 343 of an even numbered SEQ ID NO. of SEQ ID NOs: 2-220, 224-252, and 270-958, or to a reference sequence corresponding to an even numbered SEQ ID NO. of SEQ ID NOs: 2-220, 224-252, and 270-958, wherein the amino acid sequence comprises one or more substitutions relative to the reference sequence corresponding to residues 12 to 343 of SEQ ID NO: 2, 4, 106, 218, 286, 396, 436, 520, 552, or 582, or relative to the reference sequence corresponding to SEQ ID NO: 2, 4, 106, 218, 286, 396, 436, 520, 552, or 582.

[0135] In some embodiments, the engineered RNA ligase comprises an amino acid sequence having at least 70%, 75%, 80%, 81%, 82%, 83%, 84%, 85%, 86%, 87%, 88%, 89%, 90%, 91%, 92%, 93%, 94%, 95%, 96%, 97%, 98%, 99%, or more sequence identity to a reference sequence corresponding to residues 12 to 343 of SEQ ID NO: 2, 4, 106, 218, 286, 396, 436, 520, 552, or 582, or to a reference sequence corresponding to SEQ ID NO: 2, 4, 106, 218, 286, 396, 436, 520, 552, or 582, wherein the amino acid sequence comprises one or more substitutions relative to the reference sequence corresponding to residues 12 to 343 of SEQ ID NO: 2, 4, 106, 218, 286, 396, 436, 520, 552, or 582, or relative to the reference sequence corresponding to SEQ ID NO: 2, 4, 106, 218, 286, 396, 436, 520, 552, or 582.

[0136] In some embodiments, the engineered RNA ligase comprises an amino acid sequence having at least 70%, 75%, 80%, 81%, 82%, 83%, 84%, 85%, 86%, 87%, 88%, 89%, 90%, 91%, 92%, 93%, 94%, 95%, 96%, 97%, 98%, 99%, or more sequence identity to the reference sequence corresponding to residues 12 to 343 of SEQ ID NO: 2, or to the reference sequence corresponding to SEQ ID NO: 2, wherein the amino acid sequence comprises one or more substitutions relative to the reference sequence corresponding to residues 12 to 343 of SEQ ID NO: 2, or relative to the reference sequence corresponding to SEQ ID NO: 2.

[0137] In some embodiments, the engineered RNA ligase comprises an amino acid sequence having at least 70%, 75%, 80%, 81%, 82%, 83%, 84%, 85%, 86%, 87%, 88%, 89%, 90%, 91%, 92%, 93%, 94%, 95%, 96%, 97%, 98%, 99%, or more sequence identity to the reference sequence corresponding to residues 12 to 343 of SEQ ID NO: 4, 106, 218, 286, 396, 436, 520, 552, or 582, or to the reference sequence corresponding to SEQ ID NO: 4, 106, 218, 286, 396, 436, 520, 552, or 582, wherein the amino acid sequence comprises one or more substitutions relative to the reference sequence corresponding to residues 12 to 343 of SEQ ID NO: 2, or relative to the reference sequence corresponding to SEQ ID NO: 2.

[0138] In some embodiments, the engineered RNA ligase comprises an amino acid sequence having at least 70%, 75%, 80%, 81%, 82%, 83%, 84%, 85%, 86%, 87%, 88%, 89%, 90%, 91%, 92%, 93%, 94%, 95%, 96%, 97%, 98%, 99%, or more sequence identity to the reference sequence corresponding to residues 12 to 343 of an even-numbered SEQ ID NO. of SEQ ID NOs: 4-220, 224-252, and 270-958, or to a reference sequence corresponding to an even-numbered SEQ ID NO. of SEQ ID NOs: 4-220, 224-252, and 270-958, wherein the amino acid sequence comprises one or more substitutions relative to the reference sequence corresponding to residues 12 to 343 of SEQ ID NO: 2, or relative to the reference sequence corresponding to SEQ ID NO: 2.

[0139] In some embodiments, the amino acid sequence of the engineered RNA ligase comprises at least a substitution at amino acid position 11, 12, 14, 16, 17, 23, 25, 26, 30, 32, 33, 38, 40, 52, 57, 60, 68, 69, 71, 73, 75, 79, 82, 83, 92, 93, 95, 96, 98, 100, 101, 102, 103, 111, 114, 117, 118, 119, 120, 135, 136, 141, 142, 145, 147, 156, 167, 168, 170, 171, 174, 177, 179, 183, 184, 185, 188, 189, 190, 191, 192, 193, 196, 200, 202, 205, 206, 207, 209, 221, 229, 254, 255, 259, 270, 271, 287, 288, 289, 292, 295, 296, 300, 307, 320, 327, 332, 333, 334, 335, 336, 337, 339, 342, or 343, or combinations thereof, wherein the amino acid positions are relative to the reference sequence corresponding to residues 12 to 343 of SEQ ID NO: 2, or relative to the reference sequence corresponding to SEQ ID NO: 2.

[0140] In some embodiments, the amino acid sequence of the engineered RNA ligase comprises at least a substitution or amino acid residue 11P, 12S, 14F/R/T/W, 16R, 17P, 23M, 25A/G/K/L/W, 26F/G/H/L/P/R/S/V, 30A/C/H/R, 32R, 33A/K, 38D, 40E, 52L, 57T, 60R, 68W, 69L, 71K, 73T, 75L/Q/T, 79W, 82I, 83P, 92A/E/G/M/N/S, 93A, 95E/V, 96A/S, 98D/E/P/R/S, 100R, 101G, 102T, 103I, 111L, 114F/G/K/N/P/R/S/V, 117A/C/F/G/H/I/K/L/M/R/S/T/V/W, 118G/L/Q, 119A/E/S/T, 120P, 135Q/T, 136A, 141A/C/E/T, 142H/R, 145D, 147L, 156C/Y, 167A, 168A, 170E, 171E, 174Q, 177I/L, 179F, 183V, 184L/M/P/R, 185H/S, 188S, 189L/V, 190F, 191K, 192V, 193N, 196K, 200S/T, 202W, 205R/V, 206R, 207S/T, 209E/L, 221E, 229A, 254G, 255E/S, 259V, 270A, 271I, 287A, 288A, 289A/H/S/T, 292E/Y, 295R, 296E/L/R/V/W, 300E/K, 307A, 320D/K, 327I/Q/R/W, 332R, 333A/E/S/T, 334S, 335E/H/K/L, 336S, 337G, 339K/R, 342I/T, 343P, 339K/R, or 342I/T, or combinations thereof, wherein the amino acid positions are relative to the reference sequence corresponding to residues 12 to 343 of SEQ ID NO: 2, or relative to the reference sequence corresponding to SEQ ID NO: 2.

[0141] In some embodiments, the amino acid sequence of the engineered RNA ligase comprises at least a substitution or amino acid residue G11P, M12S, K14F/R/T/W, Y16R, S17P, Y23M, S25A/G/K/L/W, K26F/G/H/L/P/R/S/V, K30A/C/H/R, Y32R, T33A/K, T38D, V40E, F52L, E57T, N60R, G68W, P69L, L71K, A73T, D75L/Q/T, Y79W, V82I, L83P, T92A/E/G/M/N/S, V93A, K95E/V, F96A/S, Y98D/E/P/R/S, A100R, R101G, A102T, V103I, F111L, G114F/K/N/P/R/S/V, Q117A/C/F/G/H/I/K/L/M/R/S/T/V/W, K118G/L/Q, G119A/E/S/T, V120P, N135Q/T, T136A, N141A/C/E/T, T142H/R, T145D, Y147L, F156C/Y, G167A, T168A, D170E, S171E, M174Q, N177I/L, L179F, L183V, A184L/M/P/R, A185H/S, A188S, T189L/V, A190F, S191K, E192V, D193N, E196K, C200S/T, F202W, N205R/V, V206R, I207S/T, D209E/L, F221E, T229A, V254G, P255E/S, I259V, Y270A, V271I, T287A, P288A, K289A/H/S/T, G292E/Y, M295R, G296E/L/R/V/W, Q300E/K, S307A, N320D/K, V327I/Q/R/W, D332R, V333A/E/S/T, L334S, R335E/H/K/L, P336S, A337G, I339K/R, V342I/T, or S343P, or combinations thereof, wherein the amino acid positions are relative to the reference sequence corresponding to residues 12 to 343 of SEQ ID NO: 2, or relative to the reference sequence corresponding to SEQ ID NO: 2.

[0142] In some embodiments, the amino acid sequence of the engineered RNA ligase comprises at least a substitution at amino acid position 3, 38, 71, 73, 75, 96, 98, 101, 114, 117, 136, 156, 179, 184, 191, 196, 221, 289, 292, 296, 320, 335, 336, or 339, or combinations thereof, wherein the amino acid positions are relative to the reference sequence corresponding to residues 12 to 343 of SEQ ID NO: 2, or relative to the reference sequence corresponding to SEQ ID NO: 2.

[0143] In some embodiments, the amino acid sequence of the engineered RNA ligase comprises at least a substitution or amino acid residue 33A/K, 38D, 71K, 73T, 75L/Q/T, 96A/S, 98D/E/P/R/S, 101G, 114F/K/N/P/R/S/V, 117A/C/F/G/H/I/K/L/M/R/S/T/V/W, 136A, 156C/Y, 179F, 184L/M/P/R, 191K, 196K, 221E, 289A/H/S/T, 292E/Y, 296E/L/R/V/W, 320D/K, 335E/H/K/L, 336S, or 339K/R, or combinations thereof, wherein the amino acid positions are relative to the reference sequence corresponding to residues 12 to 343 of SEQ ID NO: 2, or relative to the reference sequence corresponding to SEQ ID NO: 2.

[0144] In some embodiments, the amino acid sequence of the engineered RNA ligase comprises at least a substitution or amino acid residue 33A, 38D, 71K, 73T, 75T, 96S, 98S, 101G, 114N, 117W, 136A, 156C, 179F, 184M, 191K, 196K, 221E, 289H, 292E, 296W, 320D, 335E/K, 336S, or 339R, or combinations thereof, wherein the amino acid positions are relative to the reference sequence corresponding to residues 12 to 343 of SEQ ID NO: 2, or relative to the reference sequence corresponding to SEQ ID NO: 2.

[0145] In some embodiments, the amino acid sequence of the engineered RNA ligase comprises at least a substitution or amino acid residue T33A, T38D, L71K, A73T, D75T, F96S, Y98S, R101G, G114N, Q117W, T136A, F156C, L179F, A184M, S191K, E196K, F221E, K289H, G292E, G296W, N320D, R335E/K, P336S, I339R, or combinations thereof, wherein the amino acid positions are relative to the reference sequence corresponding to residues 12 to 343 of SEQ ID NO: 2, or relative to the reference sequence corresponding to SEQ ID NO: 2.

[0146] In some embodiments, the amino acid sequence of the engineered RNA ligase comprises at least a substitution at amino acid position 179, wherein the amino acid positions are relative to the reference sequence corresponding to residues 12 to 343 of SEQ ID NO: 2, or relative to the reference sequence corresponding to SEQ ID NO: 2. In some embodiments, the amino acid sequence of the engineered RNA ligase comprises at least a substitution or amino acid residue 179F, wherein the amino acid positions are relative to the reference sequence corresponding to residues 12 to 343 of SEQ ID NO: 2, or relative to the reference sequence corresponding to SEQ ID NO: 2. In some embodiments, the amino acid sequence of the engineered RNA ligase comprises at least a substitution L179F, wherein the amino acid positions are relative to the reference sequence corresponding to residues 12 to 343 of SEQ ID NO: 2, or relative to the reference sequence corresponding to SEQ ID NO: 2.

[0147] In some embodiments, the amino acid sequence of the engineered RNA ligase comprises at least a substitution at amino acid position 33, 101, 221, 320, 335, 336, or 339, or combinations thereof, wherein the amino acid positions are relative to the reference sequence corresponding to residues 12 to 343 of SEQ ID NO: 2, or relative to the reference sequence corresponding to SEQ ID NO: 2. In some embodiments, the amino acid sequence of the engineered RNA ligase comprises at least a substitution 33A, 101G, 221E, 320D, 335E, 336S, or 339R, or combinations thereof, wherein the amino acid positions are relative to the reference sequence corresponding to residues 12 to 343 of SEQ ID NO: 2, or relative to the reference sequence corresponding to SEQ ID NO: 2. In some embodiments, the amino acid sequence of the engineered RNA ligase comprises at least a substitution T33A, R101G, F221E, N320D, R335E, P336S, 1339R, or combinations thereof, wherein the amino acid positions are relative to the reference sequence corresponding to residues 12 to 343 of SEQ ID NO: 2, or relative to the reference sequence corresponding to SEQ ID NO: 2. In some embodiments, the amino acid sequence of the engineered RNA ligase comprises at least a substitution set at amino acid positions 33/101/221/320/335/336/339, wherein the amino acid positions are relative to the reference sequence corresponding to residues 12 to 343 of SEQ ID NO: 2, or relative to the reference sequence corresponding to SEQ ID NO: 2. In some embodiments, the amino acid sequence of the engineered RNA ligase comprises at least a substitution set or amino acid residues 33A/101G/221E/320D/335E/336S/339R, wherein the amino acid positions are relative to the reference sequence corresponding to residues 12 to 343 of SEQ ID NO: 2, or relative to the reference sequence corresponding to SEQ ID NO: 2. In some embodiments, the amino acid sequence of the engineered RNA ligase comprises at least a substitution set or amino acid residues T33A/R101G/F221E/N320D/R335E/P336S/1339R, wherein the amino acid positions are relative to the reference sequence corresponding to residues 12 to 343 of SEQ ID NO: 2, or relative to the reference sequence corresponding to SEQ ID NO: 2.

[0148] In some embodiments, the amino acid sequence of the engineered RNA ligase comprises at least a substitution at amino acid position 38, 71, 114, 184, 191, or 196, or combinations thereof, wherein the amino acid positions are relative to the reference sequence corresponding to residues 12 to 343 of SEQ ID NO: 2, or relative to the reference sequence corresponding to SEQ ID NO: 2. In some embodiments, the amino acid sequence of the engineered RNA ligase comprises at least a substitution or amino acid residue 38D, 71K, 114N, 184M, 191K, or 196K, or combinations thereof, wherein the amino acid positions are relative to the reference sequence corresponding to residues 12 to 343 of SEQ ID NO: 2, or relative to the reference sequence corresponding to SEQ ID NO: 2. In some embodiments, the amino acid sequence of the engineered RNA ligase comprises at least a substitution or amino acid residue T38D, L71K, G114N, A184M, S191K, or E196K, or combinations thereof, wherein the amino acid positions are relative to the reference sequence corresponding to residues 12 to 343 of SEQ ID NO: 2, or relative to the reference sequence corresponding to SEQ ID NO: 2. In some embodiments, the amino acid sequence of the engineered RNA ligase comprises at least a substitution set at amino acid positions 38/71/114/184/191/196, wherein the amino acid positions are relative to the reference sequence corresponding to residues 12 to 343 of SEQ ID NO: 2, or relative to the reference sequence corresponding to SEQ ID NO: 2. In some embodiments, the amino acid sequence of the engineered RNA ligase comprises at least a substitution set or amino acid residues 38D/71K/114N/184M/191K/196K, wherein the amino acid positions are relative to the reference sequence corresponding to residues 12 to 343 of SEQ ID NO: 2, or relative to the reference sequence corresponding to SEQ ID NO: 2. In some embodiments, the amino acid sequence of the engineered RNA ligase comprises at least a substitution set or amino acid residues T38D/L71K/G114N/A184M/S191K/E196K, or combinations thereof, wherein the amino acid positions are relative to the reference sequence corresponding to residues 12 to 343 of SEQ ID NO: 2, or relative to the reference sequence corresponding to SEQ ID NO: 2.

[0149] In some embodiments, the amino acid sequence of the engineered RNA ligase comprises at least a substitution at amino acid position 117, wherein the amino acid positions are relative to the reference sequence corresponding to residues 12 to 343 of SEQ ID NO: 2, or relative to the reference sequence corresponding to SEQ ID NO: 2. In some embodiments, the amino acid sequence of the engineered RNA ligase comprises at least a substitution or amino acid residue 117W, wherein the amino acid positions are relative to the reference sequence corresponding to residues 12 to 343 of SEQ ID NO: 2, or relative to the reference sequence corresponding to SEQ ID NO: 2. In some embodiments, the amino acid sequence of the engineered RNA ligase comprises at least a substitution Q117W, wherein the amino acid positions are relative to the reference sequence corresponding to residues 12 to 343 of SEQ ID NO: 2, or relative to the reference sequence corresponding to SEQ ID NO: 2.

[0150] In some embodiments, the amino acid sequence of the engineered RNA ligase comprises at least a substitution at amino acid position 292, wherein the amino acid positions are relative to the reference sequence corresponding to residues 12 to 343 of SEQ ID NO: 2, or relative to the reference sequence corresponding to SEQ ID NO: 2. In some embodiments, the amino acid sequence of the engineered RNA ligase comprises at least a substitution 292E, wherein the amino acid positions are relative to the reference sequence corresponding to residues 12 to 343 of SEQ ID NO: 2, or relative to the reference sequence corresponding to SEQ ID NO: 2. In some embodiments, the amino acid sequence of the engineered RNA ligase comprises at least a substitution G292E, wherein the amino acid positions are relative to the reference sequence corresponding to residues 12 to 343 of SEQ ID NO: 2, or relative to the reference sequence corresponding to SEQ ID NO: 2.

[0151] In some embodiments, the amino acid sequence of the engineered RNA ligase comprises at least a substitution at amino acid position 75, 136, or 296, or combinations thereof wherein the amino acid positions are relative to the reference sequence corresponding to residues 12 to 343 of SEQ ID NO: 2, or relative to the reference sequence corresponding to SEQ ID NO: 2. In some embodiments, the amino acid sequence of the engineered RNA ligase comprises at least a substitution or amino acid residue 75T, 136A, or 296W, or combinations thereof, wherein the amino acid positions are relative to the reference sequence corresponding to residues 12 to 343 of SEQ ID NO: 2, or relative to the reference sequence corresponding to SEQ ID NO: 2. In some embodiments, the amino acid sequence of the engineered RNA ligase comprises at least a substitution or amino acid residue D75T, T136A, or G296W, or combinations thereof, wherein the amino acid positions are relative to the reference sequence corresponding to residues 12 to 343 of SEQ ID NO: 2, or relative to the reference sequence corresponding to SEQ ID NO: 2. In some embodiments, the amino acid sequence of the engineered RNA ligase comprises at least a substitution set at amino acid position 75/136/296, or combinations thereof wherein the amino acid positions are relative to the reference sequence corresponding to residues 12 to 343 of SEQ ID NO: 2, or relative to the reference sequence corresponding to SEQ ID NO: 2. In some embodiments, the amino acid sequence of the engineered RNA ligase comprises at least a substitution set or amino acid residues 75T/136A/296W, or combinations thereof, wherein the amino acid positions are relative to the reference sequence corresponding to residues 12 to 343 of SEQ ID NO: 2, or relative to the reference sequence corresponding to SEQ ID NO: 2. In some embodiments, the amino acid sequence of the engineered RNA ligase comprises at least a substitution set or amino acid residues D75T/T136A/G296W, or combinations thereof, wherein the amino acid positions are relative to the reference sequence corresponding to residues 12 to 343 of SEQ ID NO: 2, or relative to the reference sequence corresponding to SEQ ID NO: 2.

[0152] In some embodiments, the amino acid sequence of the engineered RNA ligase comprises at least a substitution at amino acid position 98, wherein the amino acid positions are relative to the reference sequence corresponding to residues 12 to 343 of SEQ ID NO: 2, or relative to the reference sequence corresponding to SEQ ID NO: 2. In some embodiments, the amino acid sequence of the engineered RNA ligase comprises at least a substitution or amino acid residue 98S, wherein the amino acid positions are relative to the reference sequence corresponding to residues 12 to 343 of SEQ ID NO: 2, or relative to the reference sequence corresponding to SEQ ID NO: 2. In some embodiments, the amino acid sequence of the engineered RNA ligase comprises at least a substitution or amino acid residue Y98S, wherein the amino acid positions are relative to the reference sequence corresponding to residues 12 to 343 of SEQ ID NO: 2, or relative to the reference sequence corresponding to SEQ ID NO: 2.

[0153] In some embodiments, the amino acid sequence of the engineered RNA ligase comprises at least a substitution at amino acid position 73, 96, 98, 156, or 335, or combinations thereof wherein the amino acid positions are relative to the reference sequence corresponding to residues 12 to 343 of SEQ ID NO: 2, or relative to the reference sequence corresponding to SEQ ID NO: 2. In some embodiments, the amino acid sequence of the engineered RNA ligase comprises at least a substitution or amino acid residue 73T, 96S, 98Y, 156C, or 335K, or combinations thereof, wherein the amino acid positions are relative to the reference sequence corresponding to residues 12 to 343 of SEQ ID NO: 2, or relative to the reference sequence corresponding to SEQ ID NO: 2. In some embodiments, the amino acid sequence of the engineered RNA ligase comprises at least a substitution or amino acid residue A73T, F96S, S98Y, F156C, or E335K, or combinations thereof, wherein the amino acid positions are relative to the reference sequence corresponding to residues 12 to 343 of SEQ ID NO: 2, or relative to the reference sequence corresponding to SEQ ID NO: 2. In some embodiments, the amino acid sequence of the engineered RNA ligase comprises at least a substitution set at amino acid positions 73/96/98/156/335, or combinations thereof wherein the amino acid positions are relative to the reference sequence corresponding to residues 12 to 343 of SEQ ID NO: 2, or relative to the reference sequence corresponding to SEQ ID NO: 2. In some embodiments, the amino acid sequence of the engineered RNA ligase comprises at least a substitution set or amino acid residues 73T/96S/98Y/156C/335K, or combinations thereof, wherein the amino acid positions are relative to the reference sequence corresponding to residues 12 to 343 of SEQ ID NO: 2, or relative to the reference sequence corresponding to SEQ ID NO: 2. In some embodiments, the amino acid sequence of the engineered RNA ligase comprises at least a substitution set or amino acid residues A73T/F96S/S98Y/F156C/E335K, or combinations thereof, wherein the amino acid positions are relative to the reference sequence corresponding to residues 12 to 343 of SEQ ID NO: 2, or relative to the reference sequence corresponding to SEQ ID NO: 2.

[0154] In some embodiments, the amino acid sequence of the engineered RNA ligase comprises at least a substitution at amino acid position 289, wherein the amino acid positions are relative to the reference sequence corresponding to residues 12 to 343 of SEQ ID NO: 2, or relative to the reference sequence corresponding to SEQ ID NO: 2. In some embodiments, the amino acid sequence of the engineered RNA ligase comprises at least a substitution or amino acid residue 289H, wherein the amino acid positions are relative to the reference sequence corresponding to residues 12 to 343 of SEQ ID NO: 2, or relative to the reference sequence corresponding to SEQ ID NO: 2. In some embodiments, the amino acid sequence of the engineered RNA ligase comprises at least a substitution or amino acid residue K289H, wherein the amino acid positions are relative to the reference sequence corresponding to residues 12 to 343 of SEQ ID NO: 2, or relative to the reference sequence corresponding to SEQ ID NO: 2.

[0155] In some embodiments, the amino acid sequence of the engineered RNA ligase comprises at least a substitution at amino acid positions 14, 32, 33, 38, 40, 57, 60, 71, 75, 82, 92, 96, 98, 101, 114, 141, 142, 145, 170, 171, 174, 179, 184, 191, 193, 196, 202, 205, 207, 209, 221, 255, 320, 327, 339, or 342, or combinations thereof, wherein the amino acid positions are relative to the reference sequence corresponding to residues 12 to 343 of SEQ ID NO: 2, or relative to the reference sequence corresponding to SEQ ID NO: 2.

[0156] In some embodiments, the amino acid sequence of the engineered RNA ligase comprises at least a substitution or amino acid residue 179F, 184P, 196K, 92A, 40E, 82I, 32R, 207T, 33K, 114K, 171E, 33A, 221E, 207S, 202W, 101G, 184R, 141C, 60R, 184L, 98R, 96S, 205V, 191K, 193N, 141A, 320K, 174Q, 98D, 71K, 142R, 57T, 320D, 205R, 209L, 145D, 14R, 209E, 342I, 255E, 327Q, 170E, 141E, 98P, 339K, 38D, 142H, 75Q, 184M, 342T, or 339R, or combinations thereof, wherein the amino acid positions are relative to the reference sequence corresponding to residues 12 to 343 of SEQ ID NO: 2, or relative to the reference sequence corresponding to SEQ ID NO: 2.

[0157] In some embodiments, the amino acid sequence of the engineered RNA ligase comprises at least a substitution or amino acid residue L179F, A184P, E196K, T92A, V40E, V82I, Y32R, I207T, T33K, G114K, S171E, T33A, F221E, I207S, F202W, R101G, A184R, N141C, N60R, A184L, Y98R, F96S, N205V, S191K, D193N, N141A, N320K, M174Q, Y98D, L71K, T142R, E57T, N320D, N205R, D209L, T145D, K14R, D209E, V342I, P255E, V327Q, D170E, N141E, Y98P, 1339K, T38D, T142H, D75Q, A184M, V342T, or I339R, or combinations thereof, wherein the amino acid positions are relative to the reference sequence corresponding to residues 12 to 343 of SEQ ID NO: 2, or relative to the reference sequence corresponding to SEQ ID NO: 2.

[0158] In some embodiments, the amino acid sequence of the engineered RNA ligase comprises at least a substitution at an amino acid position set forth in Tables 3, 4, 5, 6, 7.1, 7.2, 8, 9, 10, 11.3, 11.4, and 12, wherein the amino acid positions are relative to the reference sequence corresponding to residues 12 to 343 of SEQ ID NO: 2, or relative to the reference sequence corresponding to SEQ ID NO: 2.

[0159] In some embodiments, the amino acid sequence of the engineered RNA ligase comprises at least one substitution set forth in Tables 3, 4, 5, 6, 7.1, 7.2, 8, 9, 10, 11.3, 11.4, and 12, wherein the amino acid positions are relative to the reference sequence corresponding to residues 12 to 343 of SEQ ID NO: 2, or relative to the reference sequence corresponding to SEQ ID NO: 2.

[0160] In some embodiments, the amino acid sequence of the engineered RNA ligase comprises at least a substitution or substitution set at the amino acid position(s) set forth in Tables 3, 4, 5, 6, 7.1, 7.2, 8, 9, 10, 11.3, 11.4, and 12, wherein the amino acid positions are relative to the reference sequence corresponding to SEQ ID NO: 2.

[0161] In some embodiments, the amino acid sequence of the engineered RNA ligase comprises at least a substitution or substitution set of an RNA ligase variant set forth in Tables 3, 4, 5, 6, 7.1, 7.2, 8, 9, 10, 11.3, 11.4, and 12, wherein the amino acid positions are relative to the reference sequence corresponding to residues 12 to 343 of SEQ ID NO: 2, or relative to the reference sequence corresponding to SEQ ID NO: 2.

[0162] In some embodiments, the engineered RNA ligase comprises an amino acid sequence having at least 70%, 75%, 80%, 81%, 82%, 83%, 84%, 85%, 86%, 87%, 88%, 89%, 90%, 91%, 92%, 93%, 94%, 95%, 96%, 97%, 98%, 99%, or more sequence identity to a reference sequence corresponding to a substitution or substitution set of an RNA ligase variant set forth in Tables 3, 4, 5, 6, 7.1, 7.2, 8, 9, 10, 11.3, 11.4, and 12, wherein the amino acid positions are relative to the reference sequence corresponding to residues 12 to 343 of SEQ ID NO: 2, or relative to the reference sequence corresponding to SEQ ID NO: 2.

[0163] In some embodiments, the engineered RNA ligase comprises an amino acid sequence having at least 70%, 75%, 80%, 81%, 82%, 83%, 84%, 85%, 86%, 87%, 88%, 89%, 90%, 91%, 92%, 93%, 94%, 95%, 96%, 97%, 98%, 99%, or more sequence identity to a reference sequence corresponding to residues 12 to 343 of SEQ ID NO: 2, 4, 106, 218, 286, 396, 436, 520, 552, or 582, or to a reference sequence corresponding to SEQ ID NO: 2, 4, 106, 218, 286, 396, 436, 520, 552, or 582.

[0164] In some embodiments, the engineered RNA ligase comprises an amino acid sequence having at least 70%, 75%, 80%, 81%, 82%, 83%, 84%, 85%, 86%, 87%, 88%, 89%, 90%, 91%, 92%, 93%, 94%, 95%, 96%, 97%, 98%, 99%, or more sequence identity to a reference sequence corresponding to residues 12 to 343 of an even-numbered SEQ ID NO of SEQ ID NOs: 4-220, 224-252, and 270-958, or to a reference sequence corresponding to an even-numbered SEQ ID NO of SEQ ID NOs: 4-220, 224-252, and 270-958.

[0165] In some embodiments, the engineered RNA ligase comprises an amino acid sequence having at least 70%, 75%, 80%, 81%, 82%, 83%, 84%, 85%, 86%, 87%, 88%, 89%, 90%, 91%, 92%, 93%, 94%, 95%, 96%, 97%, 98%, 99%, or more sequence identity to a reference sequence corresponding to residues 12 to 343 of SEQ ID NO: 4, 106, 218, 286, 396, 436, 520, 552, or 582, or to a reference sequence corresponding to SEQ ID NO: 4, 106, 218, 286, 396, 436, 520, 552, or 582, wherein the amino acid sequence comprises one or more substitutions relative to the reference sequence corresponding to residues 12 to 343 of SEQ ID NO: 4, 106, 218, 286, 396, 436, 520, 552, or 582, or relative to the reference sequence corresponding to SEQ ID NO: 4, 106, 218, 286, 396, 436, 520, 552, or 582.

[0166] In some embodiments, the engineered RNA ligase comprises an amino acid sequence having at least 70%, 75%, 80%, 81%, 82%, 83%, 84%, 85%, 86%, 87%, 88%, 89%, 90%, 91%, 92%, 93%, 94%, 95%, 96%, 97%, 98%, 99%, or more sequence identity to a reference sequence corresponding to residues 12 to 343 of an even-numbered SEQ ID NO of SEQ ID NOs: 4-220, 224-252, and 270-958, or to a reference sequence corresponding to an even-numbered SEQ ID NO of SEQ ID NOs: 4-220, 224-252, and 270-958, wherein the amino acid sequence comprises one or more substitutions relative to the reference sequence corresponding to residues 12 to 343 of SEQ ID NO: 4, 106, 218, 286, 396, 436, 520, 552, or 582, or relative to the reference sequence corresponding to SEQ ID NO: 4, 106, 218, 286, 396, 436, 520, 552, or 582.

[0167] In some embodiments, the amino acid sequence of the engineered RNA ligase comprises at least a substitution at amino acid position 11, 12, 14, 16, 17, 23, 25, 26, 30, 32, 33, 38, 40, 52, 57, 60, 68, 69, 71, 73, 75, 79, 82, 83, 92, 93, 95, 96, 98, 100, 101, 102, 103, 111, 114, 117, 118, 119, 120, 135, 136, 141, 142, 145, 147, 156, 167, 168, 170, 171, 174, 177, 179, 183, 184, 185, 188, 189, 190, 191, 192, 193, 196, 200, 202, 205, 206, 207, 209, 221, 229, 254, 255, 259, 270, 271, 287, 288, 289, 292, 295, 296, 300, 307, 320, 327, 332, 333, 334, 335, 336, 337, 339, 342, or 343, or combinations thereof, wherein the amino acid positions are relative to the reference sequence corresponding to residues 12 to 343 of SEQ ID NO: 4, 106, 218, 286, 396, 436, 520, 552, or 582, or relative to the reference sequence corresponding to SEQ ID NO: 4, 106, 218, 286, 396, 436, 520, 552, or 582.

[0168] In some embodiments, the amino acid sequence of the engineered RNA ligase comprises at least a substitution or an amino acid residue 11P, 12S, 14F/R/T/W, 16R, 17P, 23M, 25A/G/K/L/W, 26F/G/H/L/P/R/S/V, 30A/C/H/R, 32R, 33A/K, 38D, 40E, 52L, 57T, 60R, 68W, 69L, 71K, 73T, 75L/Q/T, 79W, 82I, 83P, 92A/E/G/M/N/S, 93A, 95E/V, 96A/S, 98D/E/P/R/S/Y, 100R, 101G, 102T, 103I, 111L, 114F/G/K/N/P/R/S/V, 117A/C/F/G/H/I/K/L/M/R/S/T/V/W, 118G/L/Q, 119A/E/S/T, 120P, 135Q/T, 136A, 141A/C/E/T, 142H/R, 145D, 147L, 156C/F/Y, 167A, 168A, 170E, 171E, 174Q, 177I/L, 179F/L, 183V, 184L/M/P/R, 185H/S, 188S, 189L/V, 190F, 191K, 192V, 193N, 196K, 200S/T, 202W, 205R/V, 206R, 207S/T, 209E/L, 221E, 229A, 254G, 255E/S, 259V, 270A, 271I, 287A, 288A, 289A/H/K/S/T, 292E/Y, 295R, 296E/L/R/V/W, 300E/K, 307A, 320D/K, 327I/Q/R/W, 332R, 333A/E/S/T, 334S, 335E/H/K/L, 336S, 337G, 339K/R, 342I/T, 343P, 339K/R, or 342I/T, or combinations thereof, wherein the amino acid positions are relative to the reference sequence corresponding to residues 12 to 343 of SEQ ID NO: 4, 106, 218, 286, 396, 436, 520, 552, or 582, or relative to the reference sequence corresponding to SEQ ID NO: 4, 106, 218, 286, 396, 436, 520, 552, or 582.

[0169] In some embodiments, the amino acid sequence of the engineered RNA ligase comprises at least a substitution at amino acid position 33, 38, 71, 73, 75, 96, 98, 101, 114, 117, 136, 156, 179, 184, 191, 196, 221, 289, 292, 296, 320, 335, 336, or 339, or combinations thereof, wherein the amino acid positions are relative to the reference sequence corresponding to residues 12 to 343 of SEQ ID NO: 4, 106, 218, 286, 396, 436, 520, 552, or 582, or relative to the reference sequence corresponding to SEQ ID NO: 4, 106, 218, 286, 396, 436, 520, 552, or 582.

[0170] In some embodiments, the amino acid sequence of the engineered RNA ligase comprises at least a substitution or an amino acid residue 33A/K, 38D, 71K, 73T, 75L/Q/T, 96A/S, 98D/E/P/R/S/Y, 101G, 114F/G/K/N/P/R/S/V, 117A/C/F/G/H/I/K/L/M/R/S/T/V/W, 136A, 156C/F/Y, 179F/L, 184L/M/P/R, 191K, 196K, 221E, 289A/H/K/S/T, 292E/Y, 296E/L/R/V/W, 320D/K, 335E/H/K/L, 336S, or 339K/R, or combinations thereof, wherein the amino acid positions are relative to the reference sequence corresponding to residues 12 to 343 of SEQ ID NO: 4, 106, 218, 286, 396, 436, 520, 552, or 582, or relative to the reference sequence corresponding to SEQ ID NO: 4, 106, 218, 286, 396, 436, 520, 552, or 582.

[0171] In some embodiments, the amino acid sequence of the engineered RNA ligase comprises at least a substitution or an amino acid residue 33A, 38D, 71K, 73T, 75T, 96S, 98S/Y, 101G, 114N, 117W, 136A, 156C, 179F, 184M, 191K, 196K, 221E, 289H, 292E, 296W, 320D, 335E/K, 336S, or 339R, or combinations thereof, wherein the amino acid positions are relative to the reference sequence corresponding to residues 12 to 343 of SEQ ID NO: 4, 106, 218, 286, 396, 436, 520, 552, or 582, or relative to the reference sequence corresponding to SEQ ID NO: 4, 106, 218, 286, 396, 436, 520, 552, or 582.

[0172] In some embodiments, the engineered RNA ligase comprises an amino acid sequence having at least 70%, 75%, 80%, 81%, 82%, 83%, 84%, 85%, 86%, 87%, 88%, 89%, 90%, 91%, 92%, 93%, 94%, 95%, 96%, 97%, 98%, 99%, or more sequence identity to a reference sequence corresponding to residues 12 to 343 of SEQ ID NO: 4, or to a reference sequence corresponding to SEQ ID NO: 4, wherein the amino acid sequence comprises one or more substitutions relative to the reference sequence corresponding to residues 12 to 343 of SEQ ID NO: 4, or relative to the reference sequence corresponding to SEQ ID NO: 4.

[0173] In some embodiments, the engineered RNA ligase comprises an amino acid sequence having at least 70%, 75%, 80%, 81%, 82%, 83%, 84%, 85%, 86%, 87%, 88%, 89%, 90%, 91%, 92%, 93%, 94%, 95%, 96%, 97%, 98%, 99%, or more sequence identity to a reference sequence corresponding to residues 12 to 343 of an even-numbered SEQ ID NO. of SEQ ID NOs: 4-104, or to a reference sequence corresponding to an even-numbered SEQ ID NO. of SEQ ID NOs: 4-104, wherein the amino acid sequence comprises one or more substitutions relative to the reference sequence corresponding to residues 12 to 343 of SEQ ID NO: 4, or relative to the reference sequence corresponding to SEQ ID NO: 4.

[0174] In some embodiments, the amino acid sequence of the engineered RNA ligases comprises a substitution set at amino acid positions(s) 33/101/221/320/335/336/339, 71/92/171/184/202, 40/92/171/202/327, 196/300/335/339, 33/184/221/300/320, 335/336/339, 184/196/221/336, 33/184/320/335/336, 207/209/221/300/320/336/339, 101/196/221/300/335, 207/209/300/320, 40/170/171/202/327, 33/101/184/196/209/336/339, 40/71/92/171/184/327, 207/335/336/339, 33/101/196/300/320/335/336/339, 57/171/179/184/202/327, 57/92/202/327, 33/101/207/221/300/335/336/339, 33/221/336, 196/221/300/335/336/339, 33/184/221/336/339, 33/184/196/221/300, 101/196/207/209/221/300/336/339, 101/184/335/336/339, 33/184/196/320/336/339, 33/184/196/300/320/335/336/339, 184/320/335/336/339, 184/196/207/209/300/335/336/339, 184/196/320/335/336/339, 33/196/209/221/339, 184/320/335/336/339, 101/209/335/336/339, 101/196/209/339, 40/71/82/170/171/179/202/327, 320/335/336/339, 101/184/300/335/336/339, 33/101/196/209/335/336/339, 33/196/300/320, 221/335, 33/184/196/207/221, 221/335/336/339, 196/209/300/335/336/339, 184/196/300/320, 57/171/202/327, 40/71/171/184, 184/196/221, 33/196/207/335/336, 32/57/71/202/327/342, 33/196/221/336, 101/221/300/320/335/336/339, 33/101/207/221, 101/184/196/209/221, 33/207/209/300/335/336/339, or 33/83/184/196/300/336, wherein the amino acid positions are relative to the reference sequence corresponding to residues 12 to 343 of SEQ ID NO: 4, or relative to the reference sequence corresponding to SEQ ID NO: 4.

[0175] In some embodiments, the amino acid sequence of the engineered RNA ligases comprises a substitution set or amino acid residue(s) 33A/101G/221E/320D/335E/336S/339R, 71K/92A/171E/184P/202W, 40E/92A/171E/202W/327Q, 196K/300K/335E/339R, 33A/184R/221E/300K/320D, 335E/336S/339R, 184P/196K/221E/336S, 33K/184R/320D/335E/336S, 207T/209L/221E/300K/320D/336S/339R, 101G/196K/221E/300K/335E, 207T/209L/300K/320D, 40E/170E/171E/202W/327Q, 33K/101G/184R/196K/209L/336S/339R, 40E/71K/92A/171E/184P/327Q, 207T/335E/336S/339R, 33K/101G/196K/300K/320D/335E/336S/339R, 57T/171E/179L/184P/202W/327Q, 57T/92A/202W/327Q, 33K/101G/207T/221E/300K/335E/336S/339R, 33K/221E/336S, 196K/221E/300K/335E/336S/339R, 33K/184P/221E/336S/339R, 33A/184P/196K/221E/300K, 101G/196K/207T/209L/221E/300K/336S/339R, 101G/184R/335E/336S/339R, 33A/184L/196K/320D/336S/339R, 33A/184P/196K/300K/320D/335H/336S/339R, 184L/320D/335E/336S/339R, 184L/196K/207T/209L/300K/335E/336S/339R, 184R/196K/320D/335E/336S/339R, 33K/196K/209L/221E/339R, 184R/320D/335E/336S/339R, 101G/209L/335E/336S/339R, 101G/196K/209L/339R, 40E/71K/82I/170E/171E/179L/202W/327Q, 320D/335E/336S/339R, 101G/184L/300K/335E/336S/339R, 33K/101G/196K/209L/335E/336S/339R, 33K/196K/300K/320D, 221E/335E, 33K/184R/196K/207S/221E, 221E/335E/336S/339R, 196K/209L/300K/335E/336S/339R, 184P/196K/300K/320D, 57T/171E/202W/327Q, 40E/71K/171E/184P, 184L/196K/221E, 33A/196K/207S/335E/336S, 32R/57T/71K/202W/327Q/342I, 33A/196K/221E/336S, 101G/221E/300K/320D/335E/336S/339R, 33K/184P/320D/335H/336S, 33K/101G/207S/221E, 101G/184R/196K/209L/221E, 33A/207S/209L/300K/335E/336S/339R, or 33K/83P/184P/196K/300K/336S, wherein the amino acid positions are relative to the reference sequence corresponding to residues 12 to 343 of SEQ ID NO: 4, or relative to the reference sequence corresponding to SEQ ID NO: 4.

[0176] In some embodiments, the amino acid sequence of the engineered RNA ligases comprises a substitution set or amino acid residue(s) T33A/R101G/F221E/N320D/R335E/P336S/1339R, L71K/T92A/S171E/A184P/F202W, V40E/T92A/S171E/F202W/V327Q, E196K/Q300K/R335E/1339R, T33A/A184R/F221E/Q300K/N320D, R335E/P336S/I339R, A184P/E196K/F221E/P336S, T33K/A184R/N320D/R335E/P336S, I207T/D209L/F221E/Q300K/N320D/P336S/1339R, R101G/E196K/F221E/Q300K/R335E, I207T/D209L/Q300K/N320D, V40E/D170E/S171E/F202W/V327Q, T33K/R101G/A184R/E196K/D209L/P336S/1339R, V40E/L71K/T92A/S171E/A184P/V327Q, I207T/R335E/P336S/1339R, T33K/R101G/E196K/Q300K/N320D/R335E/P336S/1339R, E57T/S171E/F179L/A184P/F202W/V327Q, E57T/T92A/F202W/V327Q, T33K/R101G/I207T/F221E/Q300K/R335E/P336S/1339R, T33K/F221E/P336S, E196K/F221E/Q300K/R335E/P336S/1339R, T33K/A184P/F221E/P336S/1339R, T33A/A184P/E196K/F221E/Q300K, R101G/E196K/I207T/D209L/F221E/Q300K/P336S/1339R, R101G/A184R/R335E/P336S/1339R, T33A/A184L/E196K/N320D/P336S/1339R, T33A/A184P/E196K/Q300K/N320D/R335H/P336S/1339R, A184L/N320D/R335E/P336S/1339R, A184L/E196K/I207T/D209L/Q300K/R335E/P336S/1339R, A184R/E196K/N320D/R335E/P336S/1339R, T33K/E196K/D209L/F221E/1339R, A184R/N320D/R335E/P336S/1339R, R101G/D209L/R335E/P336S/1339R, R101G/E196K/D209L/1339R, V40E/L71K/V82I/D170E/S171E/F179L/F202W/V327Q, N320D/R335E/P336S/1339R, R101G/A184L/Q300K/R335E/P336S/1339R, T33K/R101G/E196K/D209L/R335E/P336S/1339R, T33K/E196K/Q300K/N320D, F221E/R335E, T33K/A184R/E196K/I207S/F221E, F221E/R335E/P336S/1339R, E196K/D209L/Q300K/R335E/P336S/1339R, A184P/E196K/Q300K/N320D, E57T/S171E/F202W/V327Q, V40E/L71K/S171E/A184P, A184L/E196K/F221E, T33A/E196K/1207S/R335E/P336S, Y32R/E57T/L71K/F202W/V327Q/V342I, T33A/E196K/F221E/P336S, R101G/F221E/Q300K/N320D/R335E/P336S/1339R, T33K/A184P/N320D/R335H/P336S, T33K/R101G/I207S/F221E, R101G/A184R/E196K/D209L/F221E, T33A/I207S/D209L/Q300K/R335E/P336S/1339R, or T33K/L83P/A184P/E196K/Q300K/P336S, wherein the amino acid positions are relative to the reference sequence corresponding to residues 12 to 343 of SEQ ID NO: 4, or relative to the reference sequence corresponding to SEQ ID NO: 4.

[0177] In some embodiments, the engineered RNA ligase comprises an amino acid sequence having at least 70%, 75%, 80%, 81%, 82%, 83%, 84%, 85%, 86%, 87%, 88%, 89%, 90%, 91%, 92%, 93%, 94%, 95%, 96%, 97%, 98%, 99%, or more sequence identity to a reference sequence corresponding to residues 12 to 343 of SEQ ID NO: 106, or to a reference sequence corresponding to SEQ ID NO: 106, wherein the amino acid sequence comprises one or more substitutions relative to the reference sequence corresponding to residues 12 to 343 of SEQ ID NO: 106, or relative to the reference sequence corresponding to SEQ ID NO: 106.

[0178] In some embodiments, the engineered RNA ligase comprises an amino acid sequence having at least 70%, 75%, 80%, 81%, 82%, 83%, 84%, 85%, 86%, 87%, 88%, 89%, 90%, 91%, 92%, 93%, 94%, 95%, 96%, 97%, 98%, 99%, or more sequence identity to a reference sequence corresponding to residues 12 to 343 of an even-numbered SEQ ID NO of SEQ ID NOs: 218-220 and 224-252, or to a reference sequence corresponding to an even-numbered SEQ ID NO of SEQ ID NOs: 218-220 and 224-252, wherein the amino acid sequence comprises one or more substitutions relative to the reference sequence corresponding to residues 12 to 343 of SEQ ID NO: 106, or relative to the reference sequence corresponding to SEQ ID NO: 106.

[0179] In some embodiments, the amino acid sequence of the engineered RNA ligases comprises a substitution or substitution set at amino acid positions(s) 38/71/114/184/191/196, 141/170/171/174, 114, 57/60/170/171/174/192/196/320, 60/92/170/171, 141/174/196, 57/170/171/174, 141/184, 57/60/141/170/171/174/192, 60/170/174, 141/170/171, 69/71/114/184, 38/40, 40/71/98/184/259, 32/60/141/170/171/174/196/320, 32/170/207/320, or 196, wherein the amino acid positions are relative to the reference sequence corresponding to residues 12 to 343 of SEQ ID NO: 106, or relative to the reference sequence corresponding to SEQ ID NO: 106.

[0180] In some embodiments, the amino acid sequence of the engineered RNA ligases comprises a substitution or substitution set or amino acid residue(s) 38D/71K/114N/184M/191K/196K, 141A/170E/171E/174Q, 114R, 57T/60R/170E/171E/174Q/192V/196K/320K, 60R/92A/170E/171E, 141A/174Q/196K, 57T/170E/171E/174Q, 141T/184P, 57T/60R/141A/170E/171E/174Q/192V, 60R/170E/174Q, 141C/170E/171E, 69L/71K/114N/184M, 38D/40E, 40E/71K/98R/184M/259V, 32R/60R/141A/170E/171E/174Q/196K/320K, 32R/170E/207T/320K, or 196K, wherein the amino acid positions are relative to the reference sequence corresponding to residues 12 to 343 of SEQ ID NO: 106, or relative to the reference sequence corresponding to SEQ ID NO: 106.

[0181] In some embodiments, the amino acid sequence of the engineered RNA ligases comprises a substitution or substitution set or amino acid residue(s) T38D/L71K/G114N/A184M/S191K/E196K, N141A/D170E/S171E/M174Q, G114R, E57T/N60R/D170E/S171E/M174Q/E192V/E196K/D320K, N60R/T92A/D170E/S171E, N141A/M174Q/E196K, E57T/D170E/S171E/M174Q, N141T/A184P, E57T/N60R/N141A/D170E/S171E/M174Q/E192V, N60R/D170E/M174Q, N141C/D170E/S171E, P69L/L71K/G114N/A184M, T38D/V40E, V40E/L71K/Y98R/A184M/1259V, Y32R/N60R/N141A/D170E/S171E/M174Q/E196K/D320K, Y32R/D170E/1207T/D320K, or E196K, wherein the amino acid positions are relative to the reference sequence corresponding to residues 12 to 343 of SEQ ID NO: 106, or relative to the reference sequence corresponding to SEQ ID NO: 106.

[0182] In some embodiments, the engineered RNA ligase comprises an amino acid sequence having at least 70%, 75%, 80%, 81%, 82%, 83%, 84%, 85%, 86%, 87%, 88%, 89%, 90%, 91%, 92%, 93%, 94%, 95%, 96%, 97%, 98%, 99%, or more sequence identity to a reference sequence corresponding to residues 12 to 343 of SEQ ID NO: 218, or to a reference sequence corresponding to SEQ ID NO: 218, wherein the amino acid sequence comprises one or more substitutions relative to the reference sequence corresponding to residues 12 to 343 of SEQ ID NO: 218, or relative to the reference sequence corresponding to SEQ ID NO: 218.

[0183] In some embodiments, the engineered RNA ligase comprises an amino acid sequence having at least 70%, 75%, 80%, 81%, 82%, 83%, 84%, 85%, 86%, 87%, 88%, 89%, 90%, 91%, 92%, 93%, 94%, 95%, 96%, 97%, 98%, 99%, or more sequence identity to a reference sequence corresponding to residues 12 to 343 of an even-numbered SEQ ID NO of SEQ ID NOs: 270-312, or to a reference sequence corresponding to an even-numbered SEQ ID NO of SEQ ID NOs: 270-312, wherein the amino acid sequence comprises one or more substitutions relative to the reference sequence corresponding to residues 12 to 343 of SEQ ID NO: 218, or relative to the reference sequence corresponding to SEQ ID NO: 218.

[0184] In some embodiments, the amino acid sequence of the engineered RNA ligases comprises a substitution or substitution set at amino acid positions(s) 17, 190, 16, 68, 23, 270, 117/229, or 117, wherein the amino acid positions are relative to the reference sequence corresponding to residues 12 to 343 of SEQ ID NO: 218, or relative to the reference sequence corresponding to SEQ ID NO: 218.

[0185] In some embodiments, the amino acid sequence of the engineered RNA ligases comprises a substitution or substitution set or amino acid residue(s) 102T, 17P, 190F, 16R, 68W, 23M, 270A, 117K/229A, 117W, 117T, 117H, 117A, 117M, 117G, 117I, 117K, 117R, 117S, 117V, 117F, 117C, or 117L, wherein the amino acid positions are relative to the reference sequence corresponding to residues 12 to 343 of SEQ ID NO: 218, or relative to the reference sequence corresponding to SEQ ID NO: 218.

[0186] In some embodiments, the amino acid sequence of the engineered RNA ligases comprises a substitution or substitution set or amino acid residue(s) A102T, S17P, A190F, Y16R, G68W, Y23M, Y270A, Q117K/T229A, Q117W, Q117T, Q117H, Q117A, Q117M, Q117G, Q117I, Q117K, Q117R, Q117S, Q117V, Q117F, Q117C, or Q117L, wherein the amino acid positions are relative to the reference sequence corresponding to residues 12 to 343 of SEQ ID NO: 218, or relative to the reference sequence corresponding to SEQ ID NO: 218.

[0187] In some embodiments, the engineered RNA ligase comprises an amino acid sequence having at least 70%, 75%, 80%, 81%, 82%, 83%, 84%, 85%, 86%, 87%, 88%, 89%, 90%, 91%, 92%, 93%, 94%, 95%, 96%, 97%, 98%, 99%, or more sequence identity to a reference sequence corresponding to residues 12 to 343 of SEQ ID NO: 286, or to a reference sequence corresponding to SEQ ID NO: 286, wherein the amino acid sequence comprises one or more substitutions relative to the reference sequence corresponding to residues 12 to 343 of SEQ ID NO: 286, or relative to the reference sequence corresponding to SEQ ID NO: 286.

[0188] In some embodiments, the engineered RNA ligase comprises an amino acid sequence having at least 70%, 75%, 80%, 81%, 82%, 83%, 84%, 85%, 86%, 87%, 88%, 89%, 90%, 91%, 92%, 93%, 94%, 95%, 96%, 97%, 98%, 99%, or more sequence identity to a reference sequence corresponding to residues 12 to 343 of an even-numbered SEQ ID NO of SEQ ID NOs: 314-426, or to a reference sequence corresponding to an even-numbered SEQ ID NO of SEQ ID NOs: 314-426, wherein the amino acid sequence comprises one or more substitutions relative to the reference sequence corresponding to residues 12 to 343 of SEQ ID NO: 286, or relative to the reference sequence corresponding to SEQ ID NO: 286.

[0189] In some embodiments, the amino acid sequence of the engineered RNA ligases comprises a substitution or substitution set at amino acid positions(s) 296, 114/117, 26, 30, 117/118, 117/119, 14, 183, 117, 185, 307, 12, 93/135, 135, 92, 288, 117/120, 79, 100, 287, 292, 25, 75, 327, or 111, wherein the amino acid positions are relative to the reference sequence corresponding to residues 12 to 343 of SEQ ID NO: 286, or relative to the reference sequence corresponding to SEQ ID NO: 286.

[0190] In some embodiments, the amino acid sequence of the engineered RNA ligases comprises a substitution or substitution set or amino acid residue(s) 296E, 114V/117K, 26S, 30C, 117K/118G, 114P/117K, 114S/117K, 296L, 117K/119S, 26P, 14F, 114G/117K, 114F/117K, 117K/119A, 183V, 26R, 117K, 296R, 185S, 26F, 117K/118L, 307A, 30R, 12S, 93A/135T, 117K/118Q, 185H, 135Q, 92M, 288A, 92N, 14W, 117K/119T, 92S, 92G, 117K/120P, 79W, 100R, 287A, 117K/119E, 296V, 292E, 26H, 296W, 30H, 26G, 30A, 25W, 25L, 26V, 26L, 92E, 14T, 75T, 25G, 327W, or 111L, wherein the amino acid positions are relative to the reference sequence corresponding to residues 12 to 343 of SEQ ID NO: 286, or relative to the reference sequence corresponding to SEQ ID NO: 286.

[0191] In some embodiments, the amino acid sequence of the engineered RNA ligases comprises a substitution or substitution set or amino acid residue(s) G296E, N114V/W117K, K26S, K30C, W117K/K118G, N114P/W117K, N114S/W117K, G296L, W117K/G119S, K26P, K14F, N114G/W117K, N114F/W117K, W117K/G119A, L183V, K26R, W117K, G296R, A185S, K26F, W117K/K118L, S307A, K30R, M12S, V93A/N135T, W117K/K118Q, A185H, N135Q, T92M, P288A, T92N, K14W, W117K/G119T, T92S, T92G, W117K/V120P, Y79W, A100R, T287A, W117K/G119E, G296V, G292E, K26H, G296W, K30H, K26G, K30A, S25W, S25L, K26V, K26L, T92E, K14T, D75T, S25G, V327W, or F111L, wherein the amino acid positions are relative to the reference sequence corresponding to residues 12 to 343 of SEQ ID NO: 286, or relative to the reference sequence corresponding to SEQ ID NO: 286.

[0192] In some embodiments, the engineered RNA ligase comprises an amino acid sequence having at least 70%, 75%, 80%, 81%, 82%, 83%, 84%, 85%, 86%, 87%, 88%, 89%, 90%, 91%, 92%, 93%, 94%, 95%, 96%, 97%, 98%, 99%, or more sequence identity to a reference sequence corresponding to residues 12 to 343 of SEQ ID NO: 396, or to a reference sequence corresponding to SEQ ID NO: 396, wherein the amino acid sequence comprises one or more substitutions relative to the reference sequence corresponding to residues 12 to 343 of SEQ ID NO: 396, or relative to the reference sequence corresponding to SEQ ID NO: 396.

[0193] In some embodiments, the engineered RNA ligase comprises an amino acid sequence having at least 70%, 75%, 80%, 81%, 82%, 83%, 84%, 85%, 86%, 87%, 88%, 89%, 90%, 91%, 92%, 93%, 94%, 95%, 96%, 97%, 98%, 99%, or more sequence identity to a reference sequence corresponding to residues 12 to 343 of an even-numbered SEQ ID NO of SEQ ID NOs: 428-488, or to a reference sequence corresponding to an even-numbered SEQ ID NO of SEQ ID NOs: 428-488, wherein the amino acid sequence comprises one or more substitutions relative to the reference sequence corresponding to residues 12 to 343 of SEQ ID NO: 396, or relative to the reference sequence corresponding to SEQ ID NO: 396.

[0194] In some embodiments, the amino acid sequence of the engineered RNA ligases comprises a substitution or substitution set at amino acid positions(s) 102/119, 75/102, 75/102/117, 75/119, 75/136/296, 75/327, 75/117/119, 119, 119/296, 14/102/119, 14/102/296, 14/75, 14/75/119, 14/75/119/327, 14/75/117/119, 14/75/117/119/296, 14/119, 14/296, 14/30/270, 14/25, 14/117, 14/117/119, 14/117/119/296, 14/117/296/327, 26/75/327, 25/75, 25/30/102, 117, 117/119, or 117/119/296, wherein the amino acid positions are relative to the reference sequence corresponding to residues 12 to 343 of SEQ ID NO: 396, or relative to the reference sequence corresponding to SEQ ID NO: 396.

[0195] In some embodiments, the amino acid sequence of the engineered RNA ligases comprises a substitution or substitution set or amino acid residue(s) 102T/119E, 75T/102T, 75T/102T/117M, 75T/119E, 75T/136A/296W, 75T/327W, 75T/117K/119E, 119E, 119E/296W, 14T/102T/119E, 14T/102T/296W, 14T/75T, 14T/75T/119E, 14T/75T/119E/327W, 14T/75T/117M/119E, 14T/75T/117M/119E/296W, 14T/119E, 14T/296W, 14T/30H/270A, 14T/25G, 14T/117K, 14T/117K/119E, 14T/117M/119E, 14T/117M/119E/296W, 14T/117M/296W/327W, 26V/75T/327W, 25L/75T, 25W/30H/102T, 117M, 117M/119E, or 117M/119E/296W, wherein the amino acid positions are relative to the reference sequence corresponding to residues 12 to 343 of SEQ ID NO: 396, or relative to the reference sequence corresponding to SEQ ID NO: 396.

[0196] In some embodiments, the amino acid sequence of the engineered RNA ligases comprises a substitution or substitution set or amino acid residue(s) A102T/G119E, D75T/A102T, D75T/A102T/W117M, D75T/G119E, D75T/T136A/G296W, D75T/V327W, D75T/W117K/G119E, G119E, G119E/G296W, K14T/A102T/G119E, K14T/A102T/G296W, K14T/D75T, K14T/D75T/G119E, K14T/D75T/G119E/V327W, K14T/D75T/W117M/G119E, K14T/D75T/W117M/G119E/G296W, K14T/G119E, K14T/G296W, K14T/K30H/Y270A, K14T/S25G, K14T/W117K, K14T/W117K/G119E, K14T/W117M/G119E, K14T/W117M/G119E/G296W, K14T/W117M/G296W/V327W, K26V/D75T/V327W, S25L/D75T, S25W/K30H/A102T, W117M, W117M/G119E, or W117M/G119E/G296W, wherein the amino acid positions are relative to the reference sequence corresponding to residues 12 to 343 of SEQ ID NO: 396, or relative to the reference sequence corresponding to SEQ ID NO: 396.

[0197] In some embodiments, the engineered RNA ligase comprises an amino acid sequence having at least 70%, 75%, 80%, 81%, 82%, 83%, 84%, 85%, 86%, 87%, 88%, 89%, 90%, 91%, 92%, 93%, 94%, 95%, 96%, 97%, 98%, 99%, or more sequence identity to a reference sequence corresponding to residues 12 to 343 of SEQ ID NO: 436, or to a reference sequence corresponding to SEQ ID NO: 436, wherein the amino acid sequence comprises one or more substitutions relative to the reference sequence corresponding to residues 12 to 343 of SEQ ID NO: 436, or relative to the reference sequence corresponding to SEQ ID NO: 436.

[0198] In some embodiments, the engineered RNA ligase comprises an amino acid sequence having at least 70%, 75%, 80%, 81%, 82%, 83%, 84%, 85%, 86%, 87%, 88%, 89%, 90%, 91%, 92%, 93%, 94%, 95%, 96%, 97%, 98%, 99%, or more sequence identity to a reference sequence corresponding to residues 12 to 343 of an even-numbered SEQ ID NO of SEQ ID NOs: 490-534, or to a reference sequence corresponding to an even-numbered SEQ ID NO of SEQ ID NOs: 490-534, wherein the amino acid sequence comprises one or more substitutions relative to the reference sequence corresponding to residues 12 to 343 of SEQ ID NO: 436, or relative to the reference sequence corresponding to SEQ ID NO: 436.

[0199] In some embodiments, the amino acid sequence of the engineered RNA ligases comprises a substitution or substitution set at amino acid position 332, 156, 177, 333, 96, 11, 189, 327, 25, 73, 98, 335, 95, 188, or 52, or combinations thereof, wherein the amino acid positions are relative to the reference sequence corresponding to residues 12 to 343 of SEQ ID NO: 436, or relative to the reference sequence corresponding to SEQ ID NO: 436.

[0200] In some embodiments, the amino acid sequence of the engineered RNA ligases comprises a substitution or amino acid residue 332R, 156C, 177L, 333A, 96A, 11P, 156Y, 189L, 177I, 327I, 333T, 189V, 25K, 73T, 333S, 98S, 335L, 327R, 95E, 188S, 98E, 52L, or 335K, or combinations thereof, wherein the amino acid positions are relative to the reference sequence corresponding to residues 12 to 343 of SEQ ID NO: 436, or relative to the reference sequence corresponding to SEQ ID NO: 436.

[0201] In some embodiments, the amino acid sequence of the engineered RNA ligases comprises a substitution or amino acid residue D332R, F156C, N177L, V333A, F96A, G11P, F156Y, T189L, N177I, V327I, V333T, T189V, S25K, A73T, V333S, Y98S, E335L, V327R, K95E, A188S, Y98E, F52L, or E335K, or combinations thereof, wherein the amino acid positions are relative to the reference sequence corresponding to residues 12 to 343 of SEQ ID NO: 436, or relative to the reference sequence corresponding to SEQ ID NO: 436.

[0202] In some embodiments, the engineered RNA ligase comprises an amino acid sequence having at least 70%, 75%, 80%, 81%, 82%, 83%, 84%, 85%, 86%, 87%, 88%, 89%, 90%, 91%, 92%, 93%, 94%, 95%, 96%, 97%, 98%, 99%, or more sequence identity to a reference sequence corresponding to residues 12 to 343 of SEQ ID NO: 520, or to a reference sequence corresponding to SEQ ID NO: 520, wherein the amino acid sequence comprises one or more substitutions relative to the reference sequence corresponding to residues 12 to 343 of SEQ ID NO: 520, or relative to the reference sequence corresponding to SEQ ID NO: 520.

[0203] In some embodiments, the engineered RNA ligase comprises an amino acid sequence having at least 70%, 75%, 80%, 81%, 82%, 83%, 84%, 85%, 86%, 87%, 88%, 89%, 90%, 91%, 92%, 93%, 94%, 95%, 96%, 97%, 98%, 99%, or more sequence identity to a reference sequence corresponding to residues 12 to 343 of an even-numbered SEQ ID NO of SEQ ID NOs: 536-554, or to a reference sequence corresponding to an even-numbered SEQ ID NO of SEQ ID NOs: 536-554, wherein the amino acid sequence comprises one or more substitutions relative to the reference sequence corresponding to residues 12 to 343 of SEQ ID NO: 520, or relative to the reference sequence corresponding to SEQ ID NO: 520.

[0204] In some embodiments, the amino acid sequence of the engineered RNA ligases comprises at least a substitution set at amino acid positions 96/98/156/189/335, 73/96/98/189/335, 73/177/189, 73/98/177/189/335, 25/73/95/96/98/189/327, 25/98/189, 73/95/96/156/177, 73/335, 73/96/98/156/335, or 73/177/189/333, wherein the amino acid positions are relative to the reference sequence corresponding to residues 12 to 343 of SEQ ID NO: 520, or relative to the reference sequence corresponding to SEQ ID NO: 520.

[0205] In some embodiments, the amino acid sequence of the engineered RNA ligases comprises at least a substitution set or amino acid residues 96S/98Y/156C/189V/335K, 73T/96S/98E/189L/335K, 73T/177L/189V, 73T/98E/177L/189V/335K, 25A/73T/95E/96A/98E/189V/327I, 25K/98Y/189V, 73T/95E/96S/156Y/177L, 73T/335K, 73T/96S/98Y/156C/335K, or 73T/177L/189V/333T, wherein the amino acid positions are relative to the reference sequence corresponding to residues 12 to 343 of SEQ ID NO: 520, or relative to the reference sequence corresponding to SEQ ID NO: 520.

[0206] In some embodiments, the amino acid sequence of the engineered RNA ligases comprises at least a substitution set or amino acid residues F96S/S98Y/F156C/T189V/E335K, A73T/F96S/S98E/T189L/E335K, A73T/N177L/T189V, A73T/S98E/N177L/T189V/E335K, S25A/A73T/K95E/F96A/S98E/T189V/V327I, S25K/S98Y/T189V, A73T/K95E/F96S/F156Y/N177L, A73T/E335K, A73T/F96S/S98Y/F156C/E335K, or A73T/N177L/T189V/V333T, wherein the amino acid positions are relative to the reference sequence corresponding to residues 12 to 343 of SEQ ID NO: 520, or relative to the reference sequence corresponding to SEQ ID NO: 520.

[0207] In some embodiments, the engineered RNA ligase comprises an amino acid sequence having at least 70%, 75%, 80%, 81%, 82%, 83%, 84%, 85%, 86%, 87%, 88%, 89%, 90%, 91%, 92%, 93%, 94%, 95%, 96%, 97%, 98%, 99%, or more sequence identity to a reference sequence corresponding to residues 12 to 343 of SEQ ID NO: 552, or to a reference sequence corresponding to SEQ ID NO: 552, wherein the amino acid sequence comprises one or more substitutions relative to the reference sequence corresponding to residues 12 to 343 of SEQ ID NO: 552, or relative to the reference sequence corresponding to SEQ ID NO: 552.

[0208] In some embodiments, the engineered RNA ligase comprises an amino acid sequence having at least 70%, 75%, 80%, 81%, 82%, 83%, 84%, 85%, 86%, 87%, 88%, 89%, 90%, 91%, 92%, 93%, 94%, 95%, 96%, 97%, 98%, 99%, or more sequence identity to a reference sequence corresponding to residues 12 to 343 of an even-numbered SEQ ID NO of SEQ ID NOs: 556-584, or to a reference sequence corresponding to an even-numbered SEQ ID NO of SEQ ID NOs: 556-584, wherein the amino acid sequence comprises one or more substitutions relative to the reference sequence corresponding to residues 12 to 343 of SEQ ID NO: 552, or relative to the reference sequence corresponding to SEQ ID NO: 552.

[0209] In some embodiments, the amino acid sequence of the engineered RNA ligases comprises at least a substitution at amino acid position 292, 147, 255, 295, 75, 300, 333, 200, 289, 95, or 168, or combinations thereof, wherein the amino acid positions are relative to the reference sequence corresponding to residues 12 to 343 of SEQ ID NO: 552, or relative to the reference sequence corresponding to SEQ ID NO: 552.

[0210] In some embodiments, the amino acid sequence of the engineered RNA ligases comprises at least a substitution or amino acid residue 292Y, 147L, 255S, 295R, 75L, 300E, 333E, 200S, 289S, 95V, 289A, 289T, 168A, 289H, or 200T, wherein the amino acid positions are relative to the reference sequence corresponding to residues 12 to 343 of SEQ ID NO: 552, or relative to the reference sequence corresponding to SEQ ID NO: 552.

[0211] In some embodiments, the amino acid sequence of the engineered RNA ligases comprises at least a substitution or amino acid residue E292Y, Y147L, P255S, M295R, T75L, Q300E, V333E, C200S, K289S, K95V, K289A, K289T, T168A, K289H, or C200T, wherein the amino acid positions are relative to the reference sequence corresponding to residues 12 to 343 of SEQ ID NO: 552, or relative to the reference sequence corresponding to SEQ ID NO: 552.

[0212] In some embodiments, the engineered RNA ligase comprises an amino acid sequence having at least 70%, 75%, 80%, 81%, 82%, 83%, 84%, 85%, 86%, 87%, 88%, 89%, 90%, 91%, 92%, 93%, 94%, 95%, 96%, 97%, 98%, 99%, or more sequence identity to a reference sequence corresponding to residues 12 to 343 of SEQ ID NO: 582, or to a reference sequence corresponding to SEQ ID NO: 582, wherein the amino acid sequence comprises one or more substitutions relative to the reference sequence corresponding to residues 12 to 343 of SEQ ID NO: 582, or relative to the reference sequence corresponding to SEQ ID NO: 582.

[0213] In some embodiments, the engineered RNA ligase comprises an amino acid sequence having at least 70%, 75%, 80%, 81%, 82%, 83%, 84%, 85%, 86%, 87%, 88%, 89%, 90%, 91%, 92%, 93%, 94%, 95%, 96%, 97%, 98%, 99%, or more sequence identity to a reference sequence corresponding to residues 12 to 343 of an even-numbered SEQ ID NO of SEQ ID NOs: 586-958, or to a reference sequence corresponding to an even-numbered SEQ ID NO of SEQ ID NOs: 586-958, wherein the amino acid sequence comprises one or more substitutions relative to the reference sequence corresponding to residues 12 to 343 of SEQ ID NO: 582, or relative to the reference sequence corresponding to SEQ ID NO: 582.

[0214] In some embodiments, the amino acid sequence of the engineered RNA ligases comprises at least a substitution set at amino acid position(s) 95/156/337, 189/200/271, 200/271/289/337, 200/271/289, 189/200, 156/200/289, 156/168/189/271/300, 156/189/200/289, 156/168/289, 95/156/271/289, 156/333, 95/200/289/337, 168/200/289, 189/200/289, 333/337, 103/156/271, 95/156/200/300/333, 156/271/289/333, 95/156/271, 95/189/289, 95/156/168/189/271/289/300, 189/271/289, 95/168/271/300, 156/189/289/337, 200/271, 156/189/333, 189/289, 156/189/200/300/333/337, 156/189/200/271/289/337, 156/200/271/289/333/337, 168/271/300, 289/337, 156/168/337, 156/168/189/289, 156/271/289, 189/300, 156/289/300/337, 168/189/289, 95/156/168/300, 156/200/300/337, 289/333/337, 95/189/200/300/337, 95/156/189/200/271/333, 200/271/289/300, 289/333, 189/271/300, 95/300, 95/189/333/337, 95/189/271/300, 95/189/200/289, 168, 156/200/271/289/337, 95/168/289, 156/289, 95/156/189/271/289, 156/168/189/200/289/333, 156/300/333/337, 95/156/189/200/271/337, 271, 156/271, 156/271/300/333, 95/168/200, 168/271, 95/200/333, 189/200/271/289/333, 95/168/189/333/337, 189, 189/333/337, 156/189/271/289/333, 289, 95/156/200/271/289, 289/300/333, 95/189/289/337, 95/156/168/189/289, 271/289, 333, 168/337, 156/189/271/289, 95/156/189/337, 156/189/271/300, 156/168/289/333, 168/189/289/333, 95/333, 333/343, 156/189/289, 95/289/300, 95/156/189/200/300/333/337, 189/200/271/289/337, 95/156/168/189/289/337, 95/289, 156/289/333/337, 156/289/337, 337, 168/289, 95/156/300, 95/156/289, 95/189/271/333/337, 95/168/300, 95/156/168/271/333/337, 95/189/289/333/337, 156/168/200/289/334, 95/156/168/189/271/289, 156/189/200/289/337, 200/289, 200/289/333/337, 95/168/189/200/289, 168/200, 156/168/271/289, 189/206/289, 156/200/289/333/335, 156/200/289/333, 189/200/289/333, 189/289/335, 189/254/289/333, 167/189/206/289/333/335, 156/200/333, 156/200/289/335, 156/189/289/335, 335, 156/167/189/289, 156/189/200/289/335, 200/289/333/335, 156/189/200/289/333, 254/333/335, 189/254/333/335, 189/335, 156/189/254/289, 156/289/333, 289/335, 189/200/254/289/333, 156/189/289/333, 25/156/189/289, 156/189/206/289/333/335, 289/333/335, 156/254/289/333, 156/289/333/335, 254/289, 200/289/333, 156/189/200, 156/254/333/335, 156, 254/289/335, 156/206/289, 156/289/335, 206/289/333/335, 156/189/254/289/333, 156/254/289, 200/289/335, 156/189/206/289, 156/189/200/206/254/289/333, 25/254/333, 189/289/333/335, 156/189/200/289/333/335, 254/289/333, or 156/200/333/335, wherein the amino acid positions are relative to the reference sequence corresponding to residues 12 to 343 of SEQ ID NO: 582, or relative to the reference sequence corresponding to SEQ ID NO: 582.

[0215] In some embodiments, the amino acid sequence of the engineered RNA ligases comprises at least a substitution or substitution set or amino acid residue(s) 95V/156Y/337G, 189V/200T/271I, 200S/271I/289A/337G, 200T/271I/289A, 189V/200S, 156Y/200S/289T, 156F/168A/189V/271I/300E, 156Y/189V/200T/289A, 156F/168A/289K, 95V/156Y/271I/289K, 156F/333E, 95V/200T/289K/337G, 168A/200S/289A, 189V/200T/289K, 333E/337G, 103I/156F/271I, 95V/156F/200S/300E/333E, 156F/271I/289T/333E, 95V/156F/271I, 95V/189V/289K, 95V/156Y/168A/189V/271I/289T/300E, 189V/271I/289A, 95V/168A/271I/300E, 156Y/189V/289A/337G, 200S/271I, 156F/189V/333E, 189V/289T, 156Y/189V/200T/300E/333E/337G, 156Y/200T/289A, 156F/189V/200S/271I/289K/337G, 156Y/200S/271I/289A/333E/337G, 168A/271I/300E, 289T/337G, 156Y/168A/337G, 156F/168A/189V/289T, 156Y/271I/289T, 189V/300E, 156Y/289T/300E/337G, 168A/189V/289T, 95V/156F/168A/300E, 156Y/200S/300E/337G, 289A/333E/337G, 95V/189V/200T/300E/337G, 95V/156F/189V/200T/271I/333E, 200S/271I/289A/300E, 289A/333E, 189V/271I/300E, 95V/300E, 95V/189V/333E/337G, 95V/189V/271I/300E, 95V/189V/200S/289A, 168A, 156Y/200S/271I/289K/337G, 95V/168A/289T, 156F/289A, 95V/156Y/189V/271I/289K, 156F/168A/189V/200S/289A/333E, 156F/300E/333E/337G, 95V/156F/189V/200S/271I/337G, 156F/189V/200T/289K, 156Y/289T, 271I, 156Y/271I, 156F/271I/300E/333E, 95V/168A/200S, 189V/200S/289A, 168A/271I, 95V/200T/333E, 189V/200S/271I/289A/333E, 95V/168A/189V/333E/337G, 189V, 189V/333E/337G, 156F/189V/271I/289A/333E, 289A, 95V/156F/200T/271I/289K, 289A/300E/333E, 95V/189V/289A/337G, 95V/156F/168A/189V/289A, 271I/289T, 333E, 168A/337G, 156Y/289A, 156Y/189V/271I/289K, 95V/156F/189V/337G, 189V/289K, 189V/289A, 156Y/189V/271I/300E, 156F/168A/289A/333E, 168A/189V/289K/333E, 95V/333E, 333E/343P, 156F/189V/289A, 95V/289A/300E, 95V/156Y/189V/200S/300E/333E/337G, 189V/200T/271I/289K/337G, 95V/156Y/168A/189V/289K/337G, 156F/289K, 95V/289A, 156Y/168A/289A, 156F/289K/333E/337G, 156F/289K/337G, 289A/337G, 337G, 168A/289A, 95V/156F/300E, 95V/156Y/289K, 95V/189V/271I/333E/337G, 95V/168A/300E, 95V/156Y/168A/271I/333E/337G, 95V/189V/289A/333E/337G, 156F/168A/200S/289A/334S, 95V/156F/168A/189V/271I/289T, 156Y/189V/200T/289T/337G, 156F/271I, 289K/300E/333E, 95V/156Y/271I, 200S/289A, 200S/289K/333E/337G, 95V/168A/189V/200T/289A, 156Y/271I/289T/333E, 168A/200S, 156F/168A/271I/289A, 189L/206R/289S, 156F/200S/289S/333E/335E, 156F/200S/289S/333E, 189V/200S/289K/333E, 189L/289K/335E, 189V/254G/289S/333E, 189L/289S, 167A/189L/206R/289S/333E/335E, 156F/200S/333E, 189L/200S/289S, 156Y/200S/289K/335E, 156F/189L/200S/289K, 156Y/189L/289K/335E, 156Y/200S/289K/333E, 335E, 156F/200S/289K/333E, 156F/167A/189V/289T, 156Y/189L/200S/289S/335E, 200S/289S/333E/335E, 156Y/189V/200S/289T/333E, 254G/333E/335E, 189L/254G/333E/335E, 289S, 189V/289S, 189V/335E, 156F/289T, 156F/189V/254G/289S, 156Y/289K/333E, 289S/335E, 189L/200S/254G/289S/333E, 156F/189L/289S/333E, 156Y/189V/289S/335E, 25A/156Y/189L/289S, 156Y/189V/206R/289K/333E/335E, 289S/333E/335E, 189V/200S/289S, 156F/254G/289K/333E, 156Y/289T/333E/335E, 254G/289T, 200S/289T/333E, 156Y/189V/200S, 156Y/254G/333E/335E, 156F, 254G/289K/335E, 200S/289T, 200S/289S, 156Y/206R/289S, 156F/289S/335E, 206R/289T/333E/335E, 156F/189V/254G/289K/333E, 156F/254G/289T, 200S/289T/335E, 156Y/189V/206R/289S, 156Y/189V/200S/206R/254G/289T/333E, 156Y/333E, 156Y/189L/254G/289T/333E, 25A/254G/333E, 189L/289S/333E/335E, 200S/289K/335E, 156Y/189V/289S, 156F/189L/200S/289K/333E/335E, 289T, 156F/200S/289T/335E, 254G/289S/333E, or 156F/200S/333E/335E, wherein the amino acid positions are relative to the reference sequence corresponding to residues 12 to 343 of SEQ ID NO: 582, or relative to the reference sequence corresponding to SEQ ID NO: 582.

[0216] In some embodiments, the amino acid sequence of the engineered RNA ligases comprises at least a substitution or substitution set or amino acid residue(s) K95V/C156Y/A337G, T189V/C200T/V271I, C200S/V271I/H289A/A337G, C200T/V271I/H289A, T189V/C200S, C156Y/C200S/H289T, C156F/T168A/T189V/V271I/Q300E, C156Y/T189V/C200T/H289A, C156F/T168A/H289K, K95V/C156Y/V271I/H289K, C156F/V333E, K95V/C200T/H289K/A337G, T168A/C200S/H289A, T189V/C200T/H289K, V333E/A337G, V103I/C156F/V271I, K95V/C156F/C200S/Q300E/V333E, C156F/V271I/H289T/V333E, K95V/C156F/V271I, K95V/T189V/H289K, K95V/C156Y/T168A/T189V/V271I/H289T/Q300E, T189V/V271I/H289A, K95V/T168A/V271I/Q300E, C156Y/T189V/H289A/A337G, C200S/V271I, C156F/T189V/V333E, T189V/H289T, C156Y/T189V/C200T/Q300E/V333E/A337G, C156Y/C200T/H289A, C156F/T189V/C200S/V271I/H289K/A337G, C156Y/C200S/V271I/H289A/V333E/A337G, T168A/V271I/Q300E, H289T/A337G, C156Y/T168A/A337G, C156F/T168A/T189V/H289T, C156Y/V271I/H289T, T189V/Q300E, C156Y/H289T/Q300E/A337G, T168A/T189V/H289T, K95V/C156F/T168A/Q300E, C156Y/C200S/Q300E/A337G, H289A/V333E/A337G, K95V/T189V/C200T/Q300E/A337G, K95V/C156F/T189V/C200T/V271I/V333E, C200S/V271I/H289A/Q300E, H289A/V333E, T189V/V271I/Q300E, K95V/Q300E, K95V/T189V/V333E/A337G, K95V/T189V/V271I/Q300E, K95V/T189V/C200S/H289A, T168A, C156Y/C200S/V271I/H289K/A337G, K95V/T168A/H289T, C156F/H289A, K95V/C156Y/T189V/V271I/H289K, C156F/T168A/T189V/C200S/H289A/V333E, C156F/Q300E/V333E/A337G, K95V/C156F/T189V/C200S/V271I/A337G, C156F/T189V/C200T/H289K, C156Y/H289T, V271I, C156Y/V271I, C156F/V271I/Q300E/V333E, K95V/T168A/C200S, T189V/C200S/H289A, T168A/V271I, K95V/C200T/V333E, T189V/C200S/V271I/H289A/V333E, K95V/T168A/T189V/V333E/A337G, T189V, T189V/V333E/A337G, C156F/T189V/V271I/H289A/V333E, H289A, K95V/C156F/C200T/V271I/H289K, H289A/Q300E/V333E, K95V/T189V/H289A/A337G, K95V/C156F/T168A/T189V/H289A, V271I/H289T, V333E, T168A/A337G, C156Y/H289A, C156Y/T189V/V271I/H289K, K95V/C156F/T189V/A337G, T189V/H289K, T189V/H289A, C156Y/T189V/V271I/Q300E, C156F/T168A/H289A/V333E, T168A/T189V/H289K/V333E, K95V/V333E, V333E/S343P, C156F/T189V/H289A, K95V/H289A/Q300E, K95V/C156Y/T189V/C200S/Q300E/V333E/A337G, T189V/C200T/V271I/H289K/A337G, K95V/C156Y/T168A/T189V/H289K/A337G, C156F/H289K, K95V/H289A, C156Y/T168A/H289A, C156F/H289K/V333E/A337G, C156F/H289K/A337G, H289A/A337G, A337G, T168A/H289A, K95V/C156F/Q300E, K95V/C156Y/H289K, K95V/T189V/V271I/V333E/A337G, K95V/T168A/Q300E, K95V/C156Y/T168A/V271I/V333E/A337G, K95V/T189V/H289A/V333E/A337G, C156F/T168A/C200S/H289A/L334S, K95V/C156F/T168A/T189V/V271I/H289T, C156Y/T189V/C200T/H289T/A337G, C156F/V271I, H289K/Q300E/V333E, K95V/C156Y/V271I, C200S/H289A, C200S/H289K/V333E/A337G, K95V/T168A/T189V/C200T/H289A, C156Y/V271I/H289T/V333E, T168A/C200S, C156F/T168A/V271I/H289A, T189L/V206R/H289S, C156F/C200S/H289S/V333E/K335E, C156F/C200S/H289S/V333E, T189V/C200S/H289K/V333E, T189L/H289K/K335E, T189V/V254G/H289S/V333E, T189L/H289S, G167A/T189L/V206R/H289S/V333E/K335E, C156F/C200S/V333E, T189L/C200S/H289S, C156Y/C200S/H289K/K335E, C156F/T189L/C200S/H289K, C156Y/T189L/H289K/K335E, C156Y/C200S/H289K/V333E, K335E, C156F/C200S/H289K/V333E, C156F/G167A/T189V/H289T, C156Y/T189L/C200S/H289S/K335E, C200S/H289S/V333E/K335E, C156Y/T189V/C200S/H289T/V333E, V254G/V333E/K335E, T189L/V254G/V333E/K335E, H289S, T189V/H289S, T189V/K335E, C156F/H289T, C156F/T189V/V254G/H289S, C156Y/H289K/V333E, H289S/K335E, T189L/C200S/V254G/H289S/V333E, C156F/T189L/H289S/V333E, C156Y/T189V/H289S/K335E, S25A/C156Y/T189L/H289S, C156Y/T189V/V206R/H289K/V333E/K335E, H289S/V333E/K335E, T189V/C200S/H289S, C156F/V254G/H289K/V333E, C156Y/H289T/V333E/K335E, V254G/H289T, C200S/H289T/V333E, C156Y/T189V/C200S, C156Y/V254G/V333E/K335E, C156F, V254G/H289K/K335E, C200S/H289T, C200S/H289S, C156Y/V206R/H289S, C156F/H289S/K335E, V206R/H289T/V333E/K335E, C156F/T189V/V254G/H289K/V333E, C156F/V254G/H289T, C200S/H289T/K335E, C156Y/T189V/V206R/H289S, C156Y/T189V/C200S/V206R/V254G/H289T/V333E, C156Y/V333E, C156Y/T189L/V254G/H289T/V333E, S25A/V254G/V333E, T189L/H289S/V333E/K335E, C200S/H289K/K335E, C156Y/T189V/H289S, C156F/T189L/C200S/H289K/V333E/K335E, H289T, C156F/C200S/H289T/K335E, V254G/H289S/V333E, or C156F/C200S/V333E/K335E, wherein the amino acid positions are relative to the reference sequence corresponding to residues 12 to 343 of SEQ ID NO: 582, or relative to the reference sequence corresponding to SEQ ID NO: 582.

[0217] In some embodiments, the amino acid sequence of the engineered RNA ligase comprises at least a substitution at an amino acid position set forth in Tables 3, 4, 5, 6, 7.1, 7.2, 8, 9, 10, 11.3, 11.4, and 12, wherein the amino acid positions are relative to the reference sequence corresponding to residues 12 to 343 of SEQ ID NO: 2, 4, 106, 218, 286, 396, 436, 520, 552, or 582, or relative to the reference sequence corresponding to SEQ ID NO: 2, 4, 106, 218, 286, 396, 436, 520, 552, or 582.

[0218] In some embodiments, the amino acid sequence of the engineered RNA ligase comprises at least one substitution set forth in Tables 3, 4, 5, 6, 7.1, 7.2, 8, 9, 10, 11.3, 11.4, and 12, wherein the amino acid positions are relative to the reference sequence corresponding to residues 12 to 343 of SEQ ID NO: 2, 4, 106, 218, 286, 396, 436, 520, 552, or 582, or relative to the reference sequence corresponding to SEQ ID NO: 2, 4, 106, 218, 286, 396, 436, 520, 552, or 582.

[0219] In some embodiments, the amino acid sequence of the engineered RNA ligase comprises at least a substitution or substitution set at amino acid position(s) set forth in Tables 3, 4, 5, 6, 7.1, 7.2, 8, 9, 10, 11.3, 11.4, and 12, wherein the amino acid positions are relative to the reference sequence corresponding to residues 12 to 343 of SEQ ID NO: 2, 4, 106, 218, 286, 396, 436, 520, 552, or 582, or relative to the reference sequence corresponding to SEQ ID NO: 2, 4, 106, 218, 286, 396, 436, 520, 552, or 582.

[0220] In some embodiments, the amino acid sequence of the engineered RNA ligase comprises at least a substitution or substitution set of an RNA ligase variant set forth in Tables 3, 4, 5, 6, 7.1, 7.2, 8, 9, 10, 11.3, 11.4, and 12, wherein the amino acid positions are relative to the reference sequence corresponding to residues 12 to 343 of SEQ ID NO: 2, 4, 106, 218, 286, 396, 436, 520, 552, or 582, or relative to the reference sequence corresponding to SEQ ID NO: 2, 4, 106, 218, 286, 396, 436, 520, 552, or 582.

[0221] In some embodiments, the engineered RNA ligase comprises an amino acid sequence having at least 70%, 75%, 80%, 81%, 82%, 83%, 84%, 85%, 86%, 87%, 88%, 89%, 90%, 91%, 92%, 93%, 94%, 95%, 96%, 97%, 98%, 99% or more sequence identity to a reference sequence comprising a substitution or substitution set of an RNA ligase variant set forth in Tables 3, 4, 5, 6, 7.1, 7.2, 8, 9, 10, 11.3, 11.4, and 12, wherein the amino acid positions are relative to the reference sequence corresponding to residues 12 to 343 of SEQ ID NO: 2, 4, 106, 218, 286, 396, 436, 520, 552, or 582, or relative to the reference sequence corresponding to SEQ ID NO: 2, 4, 106, 218, 286, 396, 436, 520, 552, or 582.

[0222] In some embodiments, the engineered RNA ligase comprises an amino acid sequence having at least 70%, 75%, 80%, 81%, 82%, 83%, 84%, 85%, 86%, 87%, 88%, 89%, 90%, 91%, 92%, 93%, 94%, 95%, 96%, 97%, 98%, 99% or more sequence identity to a reference sequence corresponding to residues 12 to 343 of SEQ ID NO: 4, 6, 8, 10, 12, 14, 16, 18, 20, 22, 24, 26, 28, 30, 32, 34, 36, 38, 40, 42, 44, 46, 48, 50, 52, 54, 56, 58, 60, 62, 64, 66, 68, 70, 72, 74, 76, 78, 80, 82, 84, 86, 88, 90, 92, 94, 96, 98, 100, 102, 104, 106, 108, 110, 112, 114, 116, 118, 120, 122, 124, 126, 128, 130, 132, 134, 136, 138, 140, 142, 144, 146, 148, 150, 152, 154, 156, 158, 160, 162, 164, 166, 168, 170, 172, 174, 176, 178, 180, 182, 184, 186, 188, 190, 192, 194, 196, 198, 200, 202, 204, 206, 208, 210, 212, 214, 216, 218, 220, 224, 226, 228, 230, 232, 234, 236, 238, 240, 242, 244, 246, 248, 250, 252, 270, 272, 274, 276, 278, 280, 282, 284, 286, 288, 290, 292, 294, 296, 298, 300, 302, 304, 306, 308, 310, 312, 314, 316, 318, 320, 322, 324, 326, 328, 330, 332, 334, 336, 338, 340, 342, 344, 346, 348, 350, 352, 354, 356, 358, 360, 362, 364, 366, 368, 370, 372, 374, 376, 378, 380, 382, 384, 386, 388, 390, 392, 394, 396, 398, 400, 402, 404, 406, 408, 410, 412, 414, 416, 418, 420, 422, 424, 426, 428, 430, 432, 434, 436, 438, 440, 442, 444, 446, 448, 450, 452, 454, 456, 458, 460, 462, 464, 466, 468, 470, 472, 474, 476, 478, 480, 482, 484, 486, 488, 490, 492, 494, 496, 498, 500, 502, 504, 506, 508, 510, 512, 514, 516, 518, 520, 522, 524, 526, 528, 530, 532, 534, 536, 538, 540, 542, 544, 546, 548, 550, 552, 554, 556, 558, 560, 562, 564, 566, 568, 570, 572, 574, 576, 578, 580, 582, 584, 586, 588, 590, 592, 594, 596, 598, 600, 602, 604, 506, 608, 610, 612, 614, 616, 618, 620, 622, 624, 626, 628, 630, 632, 634, 636, 638, 640, 642, 644, 646, 648, 650, 652, 654, 656, 658, 660, 662, 664, 666, 668, 670, 672, 674, 676, 678, 680, 682, 684, 686, 688, 690, 692, 694, 696, 698, 700, 702, 704, 706, 708, 710, 712, 714, 716, 718, 720, 722, 724, 726, 728, 730, 732, 734, 736, 738, 740, 742, 744, 746, 748, 750, 752, 754, 756, 758, 760, 762, 764, 766, 768, 770, 772, 774, 776, 778, 780, 782, 784, 786, 788, 790, 792, 794, 796, 798, 800, 802, 804, 806, 808, 810, 812, 814, 816, 818, 820, 822, 824, 826, 828, 830, 832, 834, 836, 838, 840, 842, 844, 846, 848, 850, 852, 854, 856, 858, 860, 862, 864, 866, 868, 870, 872, 874, 876, 878, 880, 882, 884, 886, 888, 890, 892, 894, 896, 898, 900, 902, 904, 906, 908, 910, 912, 914, 916, 918, 920, 922, 924, 926, 928, 930, 932, 934, 936, 938, 940, 942, 944, 946, 948, 950, 952, 954, 956, or 958.

[0223] In some embodiments, the engineered RNA ligase comprises an amino acid sequence having at least 70%, 75%, 80%, 85%, 86%, 87%, 88%, 89%, 90%, 91%, 92%, 93%, 94%, 95%, 96%, 97%, 98%, 99% or more sequence identity to a reference sequence corresponding to SEQ ID NO: 4, 6, 8, 10, 12, 14, 16, 18, 20, 22, 24, 26, 28, 30, 32, 34, 336, 38, 40, 42, 44, 46, 48, 50, 52, 54, 56, 58, 60, 62, 64, 66, 68, 70, 72, 74, 76, 78, 80, 82, 84, 86, 88, 90, 92, 94, 96, 98, 100, 102, 104, 106, 108, 110, 112, 114, 116, 118, 120, 122, 124, 126, 128, 130, 132, 134, 136, 138, 140, 142, 144, 146, 148, 150, 152, 154, 156, 158, 160, 162, 164, 166, 168, 170, 172, 174, 176, 178, 180, 182, 184, 186, 188, 190, 192, 194, 196, 198, 200, 202, 204, 206, 208, 210, 212, 214, 216, 218, 220, 224, 226, 228, 230, 232, 234, 236, 238, 240, 242, 244, 246, 248, 250, 252, 270, 272, 274, 276, 278, 280, 282, 284, 286, 288, 290, 292, 294, 296, 298, 300, 302, 304, 306, 308, 310, 312, 314, 316, 318, 320, 322, 324, 326, 328, 330, 332, 334, 336, 338, 340, 342, 344, 346, 348, 350, 352, 354, 356, 358, 360, 362, 364, 366, 368, 370, 372, 374, 376, 378, 380, 382, 384, 386, 388, 390, 392, 394, 396, 398, 400, 402, 404, 406, 408, 410, 412, 414, 416, 418, 420, 422, 424, 426, 428, 430, 432, 434, 436, 438, 440, 442, 444, 446, 448, 450, 452, 454, 456, 458, 460, 462, 464, 466, 468, 470, 472, 474, 476, 478, 480, 482, 484, 486, 488, 490, 492, 494, 496, 498, 500, 502, 504, 506, 508, 510, 512, 514, 516, 518, 520, 522, 524, 526, 528, 530, 532, 534, 536, 538, 540, 542, 544, 546, 548, 550, 552, 554, 556, 558, 560, 562, 564, 566, 568, 570, 572, 574, 576, 578, 580, 582, 584, 586, 588, 590, 592, 594, 596, 598, 600, 602, 604, 506, 608, 610, 612, 614, 616, 618, 620, 622, 624, 626, 628, 630, 632, 634, 636, 638, 640, 642, 644, 646, 648, 650, 652, 654, 656, 658, 660, 662, 664, 666, 668, 670, 672, 674, 676, 678, 680, 682, 684, 686, 688, 690, 692, 694, 696, 698, 700, 702, 704, 706, 708, 710, 712, 714, 716, 718, 720, 722, 724, 726, 728, 730, 732, 734, 736, 738, 740, 742, 744, 746, 748, 750, 752, 754, 756, 758, 760, 762, 764, 766, 768, 770, 772, 774, 776, 778, 780, 782, 784, 786, 788, 790, 792, 794, 796, 798, 800, 802, 804, 806, 808, 810, 812, 814, 816, 818, 820, 822, 824, 826, 828, 830, 832, 834, 836, 838, 840, 842, 844, 846, 848, 850, 852, 854, 856, 858, 860, 862, 864, 866, 868, 870, 872, 874, 876, 878, 880, 882, 884, 886, 888, 890, 892, 894, 896, 898, 900, 902, 904, 906, 908, 910, 912, 914, 916, 918, 920, 922, 924, 926, 928, 930, 932, 934, 936, 938, 940, 942, 944, 946, 948, 950, 952, 954, 956, or 958.

[0224] In some embodiments, the engineered RNA ligase comprises an amino acid sequence comprising residues 12 to 343 of an even numbered SEQ ID NO. of SEQ ID NOs: 4-220, 224-252, and 270-958, or an amino acid sequence comprising an even numbered SEQ ID NO. of SEQ ID NOs: 4-220, 224-252, and 270-958. In some embodiments, the amino acid sequence of the engineered RNA ligase optionally includes 1, 2, 3, 4, 5, 6, 7, 8, 9, or up to 10 substitutions, insertions, and/or deletions. In some embodiments, the amino acid sequence of the engineered RNA ligase optionally includes 1, 2, 3, 4, 5, 6, 7, 8, 9, or up to 10 substitutions. In some embodiments, the amino acid sequence of the engineered RNA ligase optionally includes 1, 2, 3, 4, or 5 substitutions, insertions, and/or deletions. In some embodiments, the amino acid sequence of the engineered RNA ligase optionally includes 1, 2, 3, 4, or 5 substitutions.

[0225] In some embodiments, the engineered RNA ligase comprises an amino acid sequence comprising residues 12 to 343 of SEQ ID NO: 4, 6, 8, 10, 12, 14, 16, 18, 20, 22, 24, 26, 28, 30, 32, 34, 336, 38, 40, 42, 44, 46, 48, 50, 52, 54, 56, 58, 60, 62, 64, 66, 68, 70, 72, 74, 76, 78, 80, 82, 84, 86, 88, 90, 92, 94, 96, 98, 100, 102, 104, 106, 108, 110, 112, 114, 116, 118, 120, 122, 124, 126, 128, 130, 132, 134, 136, 138, 140, 142, 144, 146, 148, 150, 152, 154, 156, 158, 160, 162, 164, 166, 168, 170, 172, 174, 176, 178, 180, 182, 184, 186, 188, 190, 192, 194, 196, 198, 200, 202, 204, 206, 208, 210, 212, 214, 216, 218, 220, 224, 226, 228, 230, 232, 234, 236, 238, 240, 242, 244, 246, 248, 250, 252, 270, 272, 274, 276, 278, 280, 282, 284, 286, 288, 290, 292, 294, 296, 298, 300, 302, 304, 306, 308, 310, 312, 314, 316, 318, 320, 322, 324, 326, 328, 330, 332, 334, 336, 338, 340, 342, 344, 346, 348, 350, 352, 354, 356, 358, 360, 362, 364, 366, 368, 370, 372, 374, 376, 378, 380, 382, 384, 386, 388, 390, 392, 394, 396, 398, 400, 402, 404, 406, 408, 410, 412, 414, 416, 418, 420, 422, 424, 426, 428, 430, 432, 434, 436, 438, 440, 442, 444, 446, 448, 450, 452, 454, 456, 458, 460, 462, 464, 466, 468, 470, 472, 474, 476, 478, 480, 482, 484, 486, 488, 490, 492, 494, 496, 498, 500, 502, 504, 506, 508, 510, 512, 514, 516, 518, 520, 522, 524, 526, 528, 530, 532, 534, 536, 538, 540, 542, 544, 546, 548, 550, 552, 554, 556, 558, 560, 562, 564, 566, 568, 570, 572, 574, 576, 578, 580, 582, 584, 586, 588, 590, 592, 594, 596, 598, 600, 602, 604, 506, 608, 610, 612, 614, 616, 618, 620, 622, 624, 626, 628, 630, 632, 634, 636, 638, 640, 642, 644, 646, 648, 650, 652, 654, 656, 658, 660, 662, 664, 666, 668, 670, 672, 674, 676, 678, 680, 682, 684, 686, 688, 690, 692, 694, 696, 698, 700, 702, 704, 706, 708, 710, 712, 714, 716, 718, 720, 722, 724, 726, 728, 730, 732, 734, 736, 738, 740, 742, 744, 746, 748, 750, 752, 754, 756, 758, 760, 762, 764, 766, 768, 770, 772, 774, 776, 778, 780, 782, 784, 786, 788, 790, 792, 794, 796, 798, 800, 802, 804, 806, 808, 810, 812, 814, 816, 818, 820, 822, 824, 826, 828, 830, 832, 834, 836, 838, 840, 842, 844, 846, 848, 850, 852, 854, 856, 858, 860, 862, 864, 866, 868, 870, 872, 874, 876, 878, 880, 882, 884, 886, 888, 890, 892, 894, 896, 898, 900, 902, 904, 906, 908, 910, 912, 914, 916, 918, 920, 922, 924, 926, 928, 930, 932, 934, 936, 938, 940, 942, 944, 946, 948, 950, 952, 954, 956, or 958. In some embodiments, the amino acid sequence of the engineered RNA ligase optionally includes 1, 2, 3, 4, 5, 6, 7, 8, 9, or up to 10 substitutions, insertions, and/or deletions. In some embodiments, the amino acid sequence of the engineered RNA ligase optionally includes 1, 2, 3, 4, 5, 6, 7, 8, 9, or up to 10 substitutions. In some embodiments, the amino acid sequence of the engineered RNA ligase optionally includes 1, 2, 3, 4, or 5 substitutions, insertions, and/or deletions. In some embodiments, the amino acid sequence of the engineered RNA ligase optionally includes 1, 2, 3, 4, or 5 substitutions.

[0226] In some embodiments, the engineered RNA ligase comprises an amino acid sequence comprising SEQ ID NO: 4, 6, 8, 10, 12, 14, 16, 18, 20, 22, 24, 26, 28, 30, 32, 34, 336, 38, 40, 42, 44, 46, 48, 50, 52, 54, 56, 58, 60, 62, 64, 66, 68, 70, 72, 74, 76, 78, 80, 82, 84, 86, 88, 90, 92, 94, 96, 98, 100, 102, 104, 106, 108, 110, 112, 114, 116, 118, 120, 122, 124, 126, 128, 130, 132, 134, 136, 138, 140, 142, 144, 146, 148, 150, 152, 154, 156, 158, 160, 162, 164, 166, 168, 170, 172, 174, 176, 178, 180, 182, 184, 186, 188, 190, 192, 194, 196, 198, 200, 202, 204, 206, 208, 210, 212, 214, 216, 218, 220, 224, 226, 228, 230, 232, 234, 236, 238, 240, 242, 244, 246, 248, 250, 252, 270, 272, 274, 276, 278, 280, 282, 284, 286, 288, 290, 292, 294, 296, 298, 300, 302, 304, 306, 308, 310, 312, 314, 316, 318, 320, 322, 324, 326, 328, 330, 332, 334, 336, 338, 340, 342, 344, 346, 348, 350, 352, 354, 356, 358, 360, 362, 364, 366, 368, 370, 372, 374, 376, 378, 380, 382, 384, 386, 388, 390, 392, 394, 396, 398, 400, 402, 404, 406, 408, 410, 412, 414, 416, 418, 420, 422, 424, 426, 428, 430, 432, 434, 436, 438, 440, 442, 444, 446, 448, 450, 452, 454, 456, 458, 460, 462, 464, 466, 468, 470, 472, 474, 476, 478, 480, 482, 484, 486, 488, 490, 492, 494, 496, 498, 500, 502, 504, 506, 508, 510, 512, 514, 516, 518, 520, 522, 524, 526, 528, 530, 532, 534, 536, 538, 540, 542, 544, 546, 548, 550, 552, 554, 556, 558, 560, 562, 564, 566, 568, 570, 572, 574, 576, 578, 580, 582, 584, 586, 588, 590, 592, 594, 596, 598, 600, 602, 604, 506, 608, 610, 612, 614, 616, 618, 620, 622, 624, 626, 628, 630, 632, 634, 636, 638, 640, 642, 644, 646, 648, 650, 652, 654, 656, 658, 660, 662, 664, 666, 668, 670, 672, 674, 676, 678, 680, 682, 684, 686, 688, 690, 692, 694, 696, 698, 700, 702, 704, 706, 708, 710, 712, 714, 716, 718, 720, 722, 724, 726, 728, 730, 732, 734, 736, 738, 740, 742, 744, 746, 748, 750, 752, 754, 756, 758, 760, 762, 764, 766, 768, 770, 772, 774, 776, 778, 780, 782, 784, 786, 788, 790, 792, 794, 796, 798, 800, 802, 804, 806, 808, 810, 812, 814, 816, 818, 820, 822, 824, 826, 828, 830, 832, 834, 836, 838, 840, 842, 844, 846, 848, 850, 852, 854, 856, 858, 860, 862, 864, 866, 868, 870, 872, 874, 876, 878, 880, 882, 884, 886, 888, 890, 892, 894, 896, 898, 900, 902, 904, 906, 908, 910, 912, 914, 916, 918, 920, 922, 924, 926, 928, 930, 932, 934, 936, 938, 940, 942, 944, 946, 948, 950, 952, 954, 956, or 958. In some embodiments, the amino acid sequence of the engineered RNA ligase optionally includes 1, 2, 3, 4, 5, 6, 7, 8, 9, or up to 10 substitutions, insertions, and/or deletions. In some embodiments, the amino acid sequence of the engineered RNA ligase optionally includes 1, 2, 3, 4, 5, 6, 7, 8, 9, or up to 10 substitutions. In some embodiments, the amino acid sequence of the engineered RNA ligase optionally includes 1, 2, 3, 4, or 5 substitutions, insertions, and/or deletions. In some embodiments, the amino acid sequence of the engineered RNA ligase optionally includes 1, 2, 3, 4, or 5 substitutions.

[0227] In some embodiments, the engineered RNA ligase comprises an amino acid sequence comprising residues 12 to 343 of SEQ ID NO: 2, 106, 218, 286, 396, 436, 520, 552, or 582, or an amino acid sequence comprising SEQ ID NO: 2, 106, 218, 286, 396, 436, 520, 552, or 582. In some embodiments, the amino acid sequence of the engineered RNA ligase optionally includes 1, 2, 3, 4, 5, 6, 7, 8, 9, or up to 10 substitutions, insertions, and/or deletions. In some embodiments, the amino acid sequence of the engineered RNA ligase optionally includes 1, 2, 3, 4, 5, 6, 7, 8, 9, or up to 10 substitutions. In some embodiments, the amino acid sequence of the engineered RNA ligase optionally includes 1, 2, 3, 4, or 5 substitutions, insertions, and/or deletions. In some embodiments, the amino acid sequence of the engineered RNA ligase optionally includes 1, 2, 3, 4, or 5 substitutions.

[0228] In some embodiments, the engineered RNA ligase of the present disclosure has RNA ligase activity on single stranded and/or double stranded polynucleotide substrates. In some embodiments, the engineered RNA ligase has RNA ligase activity and one or more improved or enhanced property as compared to a reference RNA ligase. Exemplary improved properties are provided in the Examples.

[0229] In some embodiments, the engineered RNA ligase has increased activity as compared to the reference RNA ligase. In some embodiments, the engineered RNA ligase has 1.1, 1.2, 1.3, 1.4, 1.5, 2, 2.5, 3, 3.5, 4, 4.5, 5, 6, 7, 8, 9, 10 or more fold activity compared to the reference RNA ligase. In some embodiments, the assay conditions for measuring ligase activity is described in the Examples. In some embodiments, the increase in activity is on a double stranded nick formed by double stranded fragments that have complementary ends and base pair to form the double stranded nicks, particularly where at least one or both strands of the double stranded fragments comprise modified nucleotides.

[0230] In some embodiments, the engineered RNA ligase has increased product yield as compared to the reference RNA ligase. In some embodiments, the engineered RNA ligase has increased product yield on polynucleotides substrates with phosphorothioate internucleoside linkages as compared to the reference RNA ligase. In some embodiments, the engineered RNA ligase has increased product yield on polynucleotides substrates with 2′-modifications (e.g., 2′-O-methyl and/or 2′-fluoro) as compared to the reference RNA ligase.

[0231] In particular, the engineered RNA ligase has increased activity on polynucleotide substrates having a 2′-modified sugar moiety on the 3′-terminal nucleotide and/or 5′-terminal nucleotide, where the 3′-terminal nucleotide on the polynucleotide acceptor strand is being ligated to the 5′-terminal nucleotide of the polynucleotide donor strand substrates.

[0232] In some embodiments, the engineered RNA ligase exhibits for double stranded ligase substrates a efficiency of at least 60%, 70%, 80%, 90%, 91%, 92%, 93%, 94%, 95%, 96%, 97%, 98%, 99%, or greater on polynucleotide acceptor substrate comprising a modified nucleoside at the 3′-terminal nucleoside of the polynucleotide acceptor strand. In some embodiments, the engineered RNA ligase exhibits a ligation efficiency of at least 60%, 70%, 80%, 90%, 91%, 92%, 93%, 94%, 95%, 96%, 97%, 98%, 99%, or greater for a polynucleotide acceptor strand having a modified 3′-terminal nucleoside of 2′-fluoro-adenosine, 2′-fluoro-guanosine, 2′-fluoro-cytidine, 2′-fluoro-uridine, 2′-fluoro-uridine, 2′-O-methyl-adenosine, 2′-O-methyl-guanosine, 2′-O-methyl-cytidine, or 2′-O-methyl-uridine.

[0233] In some embodiments, the engineered RNA ligase exhibits for double stranded ligase substrates a efficiency of at least 60%, 70%, 80%, 90%, 91%, 92%, 93%, 94%, 95%, 96%, 97%, 98%, 99%, or greater on polynucleotide donor substrate comprising a modified nucleoside at the 5′-terminal nucleoside of the polynucleotide acceptor strand. In some embodiments, the engineered RNA ligase exhibits a ligation efficiency of at least 60%, 70%, 80%, 90%, 91%, 92%, 93%, 94%, 95%, 96%, 97%, 98%, 99%, or greater for a polynucleotide donor strand having a modified 5′-terminal nucleoside of 2′-fluoro-adenosine, 2′-fluoro-guanosine, 2′-fluoro-cytidine, 2′-fluoro-uridine, 2′-fluoro-uridine, 2′-O-methyl-adenosine, 2′-O-methyl-guanosine, 2′-O-methyl-cytidine, or 2′-O-methyl-uridine.

[0234] In some embodiments, the engineered RNA ligase exhibits for double stranded ligase substrates a efficiency of at least 60%, 70%, 80%, 90%, 91%, 92%, 93%, 94%, 95%, 96%, 97%, 98%, 99%, or greater on polynucleotide substrates comprising a modified nucleoside at the 3′-terminal nucleoside of the polynucleotide acceptor strand. In some embodiments, the engineered RNA ligase exhibits a ligation efficiency of at least 60%, 70%, 80%, 90%, 91%, 92%, 93%, 94%, 95%, 96%, 97%, 98%, 99%, or greater for ligation of a ligase substrate comprising:
[0235] a polynucleotide acceptor strand having a modified 3′-terminal nucleoside of 2′-fluoro-adenosine, 2′-fluoro-guanosine, 2′-fluoro-cytidine, 2′-fluoro-uridine, 2′-fluoro-uridine, 2′-O-methyl-adenosine, 2′-O-methyl-guanosine, 2′-O-methyl-cytidine, or 2′-O-methyl-uridine;
[0236] a polynucleotide donor strand having a modified 5′-terminal nucleoside of 2′-fluoro-adenosine, 2′-fluoro-guanosine, 2′-fluoro-cytidine, 2′-fluoro-uridine, 2′-fluoro-uridine, 2′-O-methyl-adenosine, 2′-O-methyl-guanosine, 2′-O-methyl-cytidine, or 2′-O-methyl-uridine; and
[0237] a polynucleotide complementary to the polynucleotide acceptor strand and polynucleotide donor strand, wherein the polynucleotide complementary to the polynucleotide acceptor strand and polynucleotide donor strand comprises a complementary 2′-fluoro or 2′-O-methyl nucleoside at the position complementary to the 3′-terminal nucleoside of the polynucleotide acceptor strand, and/or a complementary 2-fluoro or 2-O-methyl nucleoside at the position complementary to the 5′-terminal nucleoside of the polynucleotide donor strand.

[0238] In some embodiments, the reference RNA ligase for comparing an RNA ligase property has the sequence corresponding to residues 12 to 343 of SEQ ID NO: 2, 4, 106, 218, 286, 396, 436, 520, 552, or 582, or the sequence corresponding to SEQ ID NO: 2, 4, 106, 218, 286, 396, 436, 520, 552, or 582. In some embodiments, the reference RNA ligase has the sequence corresponding to residues 12 to 343 of SEQ ID NO: 2, 4, 106, 218, 286, 396, 436, 520, 552, or 582, or the sequence corresponding to SEQ ID NO: 2, 4, 106, 218, 286, 396, 436, 520, 552, or 582.

[0239] In some embodiments, the engineered RNA ligase has one or more improved property selected from i) increased activity, ii) increased product yield, iii) increased product yield on polynucleotides with phosphorothioate internucleoside linkages, iv) increased product yield on oligonucleotides with 2′-modifications, and v) increased expression, or any combination of i), ii), iii), iv), and v) compared to a reference RNA ligase. In some embodiments, the reference RNA ligase has the sequence corresponding to residues 12 to 343 of SEQ ID NO: 2, 4, 106, 218, 286, 396, 436, 520, 552, or 582, or the sequence corresponding to SEQ ID NO: 2, 4, 106, 218, 286, 396, 436, 520, 552, or 582. In some embodiments, the reference RNA ligase has the sequence corresponding to residues 12 to 343 of SEQ ID NO: 2, or the sequence corresponding to SEQ ID NO: 2.

[0240] In some embodiments, the engineered RNA ligase is expressed as a fusion protein. In some embodiments, the engineered RNA ligase described herein can be fused to a variety of polypeptide sequences, such as, by way of example and not limitation, polypeptide tags that can be used for detection and/or purification. In some embodiments, the fusion protein of the engineered RNA ligase comprises a glycine-histidine or histidine-tag (His-tag). In some embodiments, the fusion protein of the engineered RNA ligase comprises a polylysine, for example, 2-12 contiguous lysine residues. In some embodiments, the fusion protein of the engineered RNA ligase comprises an epitope tag, such as c-myc, FLAG, V5, or hemagglutinin (HA). In some embodiments, the fusion protein of the engineered RNA ligase comprises a GST, SUMO, Strep, MBP, or GFP tag. In some embodiments, the fusion is to the amino (N-) terminus of engineered RNA ligase polypeptide. In some embodiments, the fusion is to the carboxy (C-) terminus of the engineered RNA ligase polypeptide.

[0241] In some embodiments, the present disclosure further provides functional fragments or biologically active fragments of engineered RNA ligase polypeptides described herein. Thus, for each and every embodiment herein of an engineered RNA ligase, a functional fragment or biologically active fragment of the engineered RNA ligase is provided herewith. In some embodiments, a functional fragment or biologically active fragments of an engineered RNA ligase comprises at least about 90%, 91%, 92%, 93%, 94%, 95%, 96%, 97%, 98%, or 99% of the activity of the RNA ligase polypeptide from which it was derived (i.e., the parent RNA ligase). In some embodiments, functional fragments or biologically active fragments comprise at least 90%, 91%, 92%, 93%, 94%, 95%, 96%, 97%, 98%, or 99% of the parent sequence of the RNA ligase. In some embodiments, the functional fragment will be truncated by less than 5, less than 10, less than 15, less than 10, less than 25, less than 30, or less than 35 amino acids.

[0242] In some embodiments, the functional fragments or biologically active fragments of the engineered RNA ligase polypeptide described herein include at least a mutation or mutation set in the amino acid sequence of the engineered RNA ligase described herein. Accordingly, in some embodiments, the functional fragments or biologically active fragments of the engineered RNA ligase displays the enhanced or improved property associated with the mutation or mutation set in the parent RNA ligase.

[0243] In some embodiments, the engineered RNA ligase is purified, as described herein. In some embodiments, the purified preparation has the engineered RNA ligase at least 60%, 70%, 80%, 85%, 90%, or 95% greater of the protein content of the preparation.

[0244] In some embodiments, an engineered RNA ligase described herein is provided immobilized on a substrate or support medium, such as a solid substrate, a porous substrate, a membrane, or particles. The polypeptide can be entrapped in matrixes or membranes. In some embodiments, matrices include polymeric materials such as calcium-alginate, agar, k-carrageenin, polyacrylamide, and collagen. In some embodiments, the solid matrices, includes, among others, activated carbon, porous ceramic, and diatomaceous earth. In some embodiments, the matrix is a particle, a membrane, or a fiber. Types of membranes include, among others, nylon, cellulose, polysulfone, or polyacrylate.

[0245] In some embodiments, the engineered RNA ligase is immobilized on the surface of a support material. In some embodiments, the polypeptide is adsorbed on the support material. In some embodiments, the polypeptide is immobilized on the support material by covalent attachment. Support materials include, among others, inorganic materials, such as alumina, silica, porous glass, ceramics, diatomaceous earth, clay, and bentonite, or organic materials, such as cellulose (CMC, DEAE-cellulose), starch, activated carbon, polyacrylamide, polystyrene, and ion-exchange resins, such as Amberlite, Sephadex, and Dowex.

### Polynucleotides Encoding Engineered Polypeptides, Expression Vectors and Host Cells

[0246] In another aspect, the present disclosure provides a recombinant polynucleotide comprising a polynucleotide sequence encoding the engineered RNA ligase described herein. In some embodiments, the recombinant polynucleotide is operably linked to one or more control sequences to create a recombinant polynucleotide construct capable of expressing the engineered RNA ligase. In some embodiments, the expression constructs encoding an engineered RNA ligase polypeptide is introduced into appropriate host cells to express the encoded RNA ligase polypeptide.

[0247] As will be apparent to the skilled artisan, availability of a protein sequence and the knowledge of the codons corresponding to the various amino acids provide a description of all the polynucleotides capable of encoding the subject RNA ligase polypeptides. The degeneracy of the genetic code, where the same amino acids are encoded by alternative or synonymous codons, allows an extremely large number of nucleic acids to be made, all of which encode an engineered RNA ligase of the present disclosure. Thus, the present disclosure provides methods and compositions for the production of each and every possible variation of polynucleotides that could be made that encode the engineered RNA ligase polypeptides described herein by selecting combinations based on the possible codon choices, and all such variations are to be considered specifically disclosed for any polypeptide described herein, including the amino acid sequences presented in the Examples (e.g., Tables 3, 4, 5, 6, 7.1, 7.2, 8, 9, 10, 11.3, 11.4, and 12) and in the Sequence Listing.

[0248] In some embodiments, the codons are preferably optimized for utilization by the chosen host cell for protein production. In some embodiments, preferred codons in bacteria are used for expression in bacteria. In some embodiments, preferred codons in fungal cells are used for expression in fungal cells. In some embodiments, preferred codons in mammalian cells are used for expression in mammalian cells. In some embodiments, codon optimized polynucleotides encoding an engineered RNA ligase polypeptide described herein contain preferred codons at about 40%, 50%, 60%, 70%, 80%, 90%, or greater than 90% of the codon positions in the full length coding region.

[0249] Accordingly, by way of example and not limitations, in some embodiments, the recombinant polynucleotide comprises a polynucleotide sequence encoding an engineered RNA ligase comprising an amino acid sequence having at least 70%, 75%, 80%, 81%, 82%, 83%, 84%, 85%, 86%, 87%, 88%, 89%, 90%, 91%, 92%, 93%, 94%, 95%, 96%, 97%, 98%, 99%, or more sequence identity to a reference sequence corresponding to residues 12 to 343 of an even numbered SEQ ID NO. of SEQ ID NOs: 2-220, 224-252, and 270-958, or to a reference sequence corresponding to an even numbered SEQ ID NO. of SEQ ID NOs: 2-220, 224-252, and 270-958, wherein the amino acid sequence comprises one or more substitutions relative to the reference sequence corresponding to residues 12 to 343 of SEQ ID NO: 2, 4, 106, 218, 286, 396, 436, 520, 552, or 582, or relative to the reference sequence corresponding to SEQ ID NO: 2, 4, 106, 218, 286, 396, 436, 520, 552, or 582.

[0250] In some embodiments, the recombinant polynucleotide comprises a polynucleotide sequence encoding an engineered RNA ligase comprising an amino acid sequence having at least 70%, 75%, 80%, 81%, 82%, 83%, 84%, 85%, 86%, 87%, 88%, 89%, 90%, 91%, 92%, 93%, 94%, 95%, 96%, 97%, 98%, 99%, or more sequence identity to a reference sequence corresponding to residues 12 to 343 of SEQ ID NO: 2, 4, 106, 218, 286, 396, 436, 520, 552, or 582, or to a reference sequence corresponding to SEQ ID NO: 2, 4, 106, 218, 286, 396, 436, 520, 552, or 582, wherein the amino acid sequence comprises one or more substitutions relative to the reference sequence corresponding to residues 12 to 343 of SEQ ID NO: 2, 4, 106, 218, 286, 396, 436, 520, 552, or 582, or relative to the reference sequence corresponding to SEQ ID NO: 2, 4, 106, 218, 286, 396, 436, 520, 552, or 582.

[0251] In some embodiments, the recombinant polynucleotide comprises a polynucleotide sequence encoding an engineered RNA ligase comprising an amino acid sequence having at least 70%, 75%, 80%, 81%, 82%, 83%, 84%, 85%, 86%, 87%, 88%, 89%, 90%, 91%, 92%, 93%, 94%, 95%, 96%, 97%, 98%, 99%, or more sequence identity to the reference sequence corresponding to residues 12 to 343 of SEQ ID NO: 2, or to the reference sequence corresponding to SEQ ID NO: 2, wherein the amino acid sequence comprises one or more substitutions relative to the reference sequence corresponding to residues 12 to 343 of SEQ ID NO: 2, or relative to the reference sequence corresponding to SEQ ID NO: 2.

[0252] In some embodiments, the recombinant polynucleotide comprises a polynucleotide sequence encoding an engineered RNA ligase comprising an amino acid sequence having at least 70%, 75%, 80%, 81%, 82%, 83%, 84%, 85%, 86%, 87%, 88%, 89%, 90%, 91%, 92%, 93%, 94%, 95%, 96%, 97%, 98%, 99%, or more sequence identity to the reference sequence corresponding to residues 12 to 343 of SEQ ID NO: 2, or to the reference sequence corresponding to SEQ ID NO: 2, wherein the amino acid sequence comprises one or more substitutions relative to the reference sequence corresponding to residues 12 to 343 of SEQ ID NO: 2, or relative to the reference sequence corresponding to SEQ ID NO: 2.

[0253] In some embodiments, the recombinant polynucleotide comprises a polynucleotide sequence encoding an engineered RNA ligase comprising an amino acid sequence having at least 70%, 75%, 80%, 81%, 82%, 83%, 84%, 85%, 86%, 87%, 88%, 89%, 90%, 91%, 92%, 93%, 94%, 95%, 96%, 97%, 98%, 99%, or more sequence identity to the reference sequence corresponding to residues 12 to 343 of SEQ ID NO: 4, 106, 218, 286, 396, 436, 520, 552, or 582, or to the reference sequence corresponding to SEQ ID NO: 4, 106, 218, 286, 396, 436, 520, 552, or 582, wherein the amino acid sequence comprises one or more substitutions relative to the reference sequence corresponding to residues 12 to 343 of SEQ ID NO: 2, or relative to the reference sequence corresponding to SEQ ID NO: 2.

[0254] In some embodiments, the recombinant polynucleotide comprises a polynucleotide sequence encoding an engineered RNA ligase comprising an amino acid sequence having at least 70%, 75%, 80%, 81%, 82%, 83%, 84%, 85%, 86%, 87%, 88%, 89%, 90%, 91%, 92%, 93%, 94%, 95%, 96%, 97%, 98%, 99%, or more sequence identity to the reference sequence corresponding to residues 12 to 343 of an even-numbered SEQ ID NO. of SEQ ID NOs: 4-220, 224-252, and 270-958, or to a reference sequence corresponding to an even-numbered SEQ ID NO. of SEQ ID NOs: 4-220, 224-252, and 270-958, wherein the amino acid sequence comprises one or more substitutions relative to the reference sequence corresponding to residues 12 to 343 of SEQ ID NO: 2, or relative to the reference sequence corresponding to SEQ ID NO: 2.

[0255] In some embodiments, the recombinant polynucleotide comprises a polynucleotide sequence encoding an engineered RNA ligase comprising an amino acid sequence comprising at least a substitution at amino acid position 11, 12, 14, 16, 17, 23, 25, 26, 30, 32, 33, 38, 40, 52, 57, 60, 68, 69, 71, 73, 75, 79, 82, 83, 92, 93, 95, 96, 98, 100, 101, 102, 103, 111, 114, 117, 118, 119, 120, 135, 136, 141, 142, 145, 147, 156, 167, 168, 170, 171, 174, 177, 179, 183, 184, 185, 188, 189, 190, 191, 192, 193, 196, 200, 202, 205, 206, 207, 209, 221, 229, 254, 255, 259, 270, 271, 287, 288, 289, 292, 295, 296, 300, 307, 320, 327, 332, 333, 334, 335, 336, 337, 339, 342, or 343, or combinations thereof, wherein the amino acid positions are relative to the reference sequence corresponding to residues 12 to 343 of SEQ ID NO: 2, or relative to the reference sequence corresponding to SEQ ID NO: 2.

[0256] In some embodiments, the recombinant polynucleotide comprises a polynucleotide sequence encoding an engineered RNA ligase comprising an amino acid sequence comprising at least a substitution at amino acid position 33, 38, 71, 73, 75, 96, 98, 101, 114, 117, 136, 156, 179, 184, 191, 196, 221, 289, 292, 296, 320, 335, 336, or 339, or combinations thereof, wherein the amino acid positions are relative to the reference sequence corresponding to residues 12 to 343 of SEQ ID NO: 2, or relative to the reference sequence corresponding to SEQ ID NO: 2.

[0257] In some embodiments, the recombinant polynucleotide comprises a polynucleotide sequence encoding an engineered RNA ligase comprising an amino acid sequence comprising at least a substitution at amino acid position 14, 32, 33, 38, 40, 57, 60, 71, 75, 82, 92, 96, 98, 101, 114, 141, 142, 145, 170, 171, 174, 179, 184, 191, 193, 196, 202, 205, 207, 209, 221, 255, 320, 327, 339, or 342, or combinations thereof, wherein the amino acid positions are relative to the reference sequence corresponding to residues 12 to 343 of SEQ ID NO: 2, or relative to the reference sequence corresponding to SEQ ID NO: 2.

[0258] In some embodiments, the recombinant polynucleotide comprises a polynucleotide sequence encoding an engineered RNA ligase comprising an amino acid sequence comprising at least a substitution at an amino acid position set forth in Tables 3, 4, 5, 6, 7.1, 7.2, 8, 9, 10, 11.3, 11.4, and 12, wherein the amino acid positions are relative to the reference sequence corresponding to residues 12 to 343 of SEQ ID NO: 2, or relative to the reference sequence corresponding to SEQ ID NO: 2.

[0259] In some embodiments, the recombinant polynucleotide comprises a polynucleotide sequence encoding an engineered RNA ligase comprising an amino acid sequence comprising at least one substitution set forth in Tables 3, 4, 5, 6, 7.1, 7.2, 8, 9, 10, 11.3, 11.4, and 12, wherein the amino acid positions are relative to the reference sequence corresponding to residues 12 to 343 of SEQ ID NO: 2, or relative to the reference sequence corresponding to SEQ ID NO: 2.

[0260] In some embodiments, the recombinant polynucleotide comprises a polynucleotide sequence encoding an engineered RNA ligase comprising an amino acid sequence comprising at least a substitution or substitution set at amino acid position(s) set forth in Tables 3, 4, 5, 6, 7.1, 7.2, 8, 9, 10, 11.3, 11.4, and 12, wherein the amino acid positions are relative to the reference sequence corresponding to residues 12 to 343 of SEQ ID NO: 2, or relative to the reference sequence corresponding to SEQ ID NO: 2.

[0261] In some embodiments, the recombinant polynucleotide comprises a polynucleotide sequence encoding an engineered RNA ligase comprising an amino acid sequence comprising at least a substitution or substitution set of a RNA ligase variant forth in Tables 3, 4, 5, 6, 7.1, 7.2, 8, 9, 10, 11.3, 11.4, and 12, wherein the amino acid positions are relative to the reference sequence corresponding to residues 12 to 343 of SEQ ID NO: 2, or relative to the reference sequence corresponding to SEQ ID NO: 2.

[0262] In some embodiments, the recombinant polynucleotide comprises a polynucleotide sequence encoding an engineered RNA ligase comprising an amino acid sequence having at least 70%, 75%, 80%, 81%, 82%, 83%, 84%, 85%, 86%, 87%, 88%, 89%, 90%, 91%, 92%, 93%, 94%, 95%, 96%, 97%, 98%, 99%, or more sequence identity to a reference sequence corresponding to residues 12 to 343 of SEQ ID NO: 4, 106, 218, 286, 396, 436, 520, 552, or 582, or to a reference sequence corresponding to SEQ ID NO: 4, 106, 218, 286, 396, 436, 520, 552, or 582.

[0263] In some embodiments, the recombinant polynucleotide comprises a polynucleotide sequence encoding an engineered RNA ligase comprising an amino acid sequence having at least 70%, 75%, 80%, 81%, 82%, 83%, 84%, 85%, 86%, 87%, 88%, 89%, 90%, 91%, 92%, 93%, 94%, 95%, 96%, 97%, 98%, 99%, or more sequence identity to a reference sequence corresponding to residues 12 to 343 of an even-numbered SEQ ID NO of SEQ ID NOs: 4-220, 224-252, and 270-958, or to a reference sequence corresponding to an even-numbered SEQ ID NO of SEQ ID NOs: 4-220, 224-252, and 270-958.

[0264] In some embodiments, the recombinant polynucleotide comprises a polynucleotide sequence encoding an engineered RNA ligase comprising an amino acid sequence having at least 70%, 75%, 80%, 81%, 82%, 83%, 84%, 85%, 86%, 87%, 88%, 89%, 90%, 91%, 92%, 93%, 94%, 95%, 96%, 97%, 98%, 99%, or more sequence identity to a reference sequence corresponding to residues 12 to 343 of SEQ ID NO: 4, 106, 218, 286, 396, 436, 520, 552, or 582, or to a reference sequence corresponding to SEQ ID NO: 4, 106, 218, 286, 396, 436, 520, 552, or 582, wherein the amino acid sequence comprises one or more substitutions relative to the reference sequence corresponding to residues 12 to 343 of SEQ ID NO: 4, 106, 218, 286, 396, 436, 520, 552, or 582, or relative to the reference sequence corresponding to SEQ ID NO: 4, 106, 218, 286, 396, 436, 520, 552, or 582.

[0265] In some embodiments, the recombinant polynucleotide comprises a polynucleotide sequence encoding an engineered RNA ligase comprising an amino acid sequence having at least 70%, 75%, 80%, 81%, 82%, 83%, 84%, 85%, 86%, 87%, 88%, 89%, 90%, 91%, 92%, 93%, 94%, 95%, 96%, 97%, 98%, 99%, or more sequence identity to a reference sequence corresponding to residues 12 to 343 of an even-numbered SEQ ID NO of SEQ ID NOs: 4-220, 224-252, and 270-958, or to a reference sequence corresponding to an even-numbered SEQ ID NO of SEQ ID NOs: 4-220, 224-252, and 270-958, wherein the amino acid sequence comprises one or more substitutions relative to the reference sequence corresponding to residues 12 to 343 of SEQ ID NO: 4, 106, 218, 286, 396, 436, 520, 552, or 582, or relative to the reference sequence corresponding to SEQ ID NO: 4, 106, 218, 286, 396, 436, 520, 552, or 582.

[0266] In some embodiments, the recombinant polynucleotide comprises a polynucleotide sequence encoding an engineered RNA ligase comprising an amino acid sequence comprising at least a substitution at amino acid position 11, 12, 14, 16, 17, 23, 25, 26, 30, 32, 33, 38, 40, 52, 57, 60, 68, 69, 71, 73, 75, 79, 82, 83, 92, 93, 95, 96, 98, 100, 101, 102, 103, 111, 114, 117, 118, 119, 120, 135, 136, 141, 142, 145, 147, 156, 167, 168, 170, 171, 174, 177, 179, 183, 184, 185, 188, 189, 190, 191, 192, 193, 196, 200, 202, 205, 206, 207, 209, 221, 229, 254, 255, 259, 270, 271, 287, 288, 289, 292, 295, 296, 300, 307, 320, 327, 332, 333, 334, 335, 336, 337, 339, 342, or 343, or combinations thereof, wherein the amino acid positions are relative to the reference sequence corresponding to residues 12 to 343 of SEQ ID NO: 4, 106, 218, 286, 396, 436, 520, 552, or 582, or relative to the reference sequence corresponding to SEQ ID NO: 4, 106, 218, 286, 396, 436, 520, 552, or 582.

[0267] In some embodiments, the recombinant polynucleotide comprises a polynucleotide sequence encoding an engineered RNA ligase comprising an amino acid sequence having at least 70%, 75%, 80%, 81%, 82%, 83%, 84%, 85%, 86%, 87%, 88%, 89%, 90%, 91%, 92%, 93%, 94%, 95%, 96%, 97%, 98%, 99%, or more sequence identity to a reference sequence corresponding to residues 12 to 343 of SEQ ID NO: 4, or to a reference sequence corresponding to SEQ ID NO: 4, wherein the amino acid sequence comprises one or more substitutions relative to the reference sequence corresponding to residues 12 to 343 of SEQ ID NO: 4, or relative to the reference sequence corresponding to SEQ ID NO: 4.

[0268] In some embodiments, the recombinant polynucleotide comprises a polynucleotide sequence encoding an engineered RNA ligase comprising an amino acid sequence having at least 70%, 75%, 80%, 81%, 82%, 83%, 84%, 85%, 86%, 87%, 88%, 89%, 90%, 91%, 92%, 93%, 94%, 95%, 96%, 97%, 98%, 99%, or more sequence identity to a reference sequence corresponding to residues 12 to 343 of an even-numbered SEQ ID NO. of SEQ ID NOs: 4-104, or to a reference sequence corresponding to an even-numbered SEQ ID NO. of SEQ ID NOs: 4-104, wherein the amino acid sequence comprises one or more substitutions relative to the reference sequence corresponding to residues 12 to 343 of SEQ ID NO: 4, or relative to the reference sequence corresponding to SEQ ID NO: 4.

[0269] In some embodiments, the recombinant polynucleotide comprises a polynucleotide sequence encoding an engineered RNA ligase comprising an amino acid sequence comprising at least a substitution set at amino acid position(s) 33/101/221/320/335/336/339, 71/92/171/184/202, 40/92/171/202/327, 196/300/335/339, 33/184/221/300/320, 335/336/339, 184/196/221/336, 33/184/320/335/336, 207/209/221/300/320/336/339, 101/196/221/300/335, 207/209/300/320, 40/170/171/202/327, 33/101/184/196/209/336/339, 40/71/92/171/184/327, 207/335/336/339, 33/101/196/300/320/335/336/339, 57/171/179/184/202/327, 57/92/202/327, 33/101/207/221/300/335/336/339, 33/221/336, 196/221/300/335/336/339, 33/184/221/336/339, 33/184/196/221/300, 101/196/207/209/221/300/336/339, 101/184/335/336/339, 33/184/196/320/336/339, 33/184/196/300/320/335/336/339, 184/320/335/336/339, 184/196/207/209/300/335/336/339, 184/196/320/335/336/339, 33/196/209/221/339, 184/320/335/336/339, 101/209/335/336/339, 101/196/209/339, 40/71/82/170/171/179/202/327, 320/335/336/339, 101/184/300/335/336/339, 33/101/196/209/335/336/339, 33/196/300/320, 221/335, 33/184/196/207/221, 221/335/336/339, 196/209/300/335/336/339, 184/196/300/320, 57/171/202/327, 40/71/171/184, 184/196/221, 33/196/207/335/336, 32/57/71/202/327/342, 33/196/221/336, 101/221/300/320/335/336/339, 33/101/207/221, 101/184/196/209/221, 33/207/209/300/335/336/339, or 33/83/184/196/300/336, wherein the amino acid positions are relative to the reference sequence corresponding to residues 12 to 343 of SEQ ID NO: 4, or relative to the reference sequence corresponding to SEQ ID NO: 4.

[0270] In some embodiments, the recombinant polynucleotide comprises a polynucleotide sequence encoding an engineered RNA ligase comprising an amino acid sequence having at least 70%, 75%, 80%, 81%, 82%, 83%, 84%, 85%, 86%, 87%, 88%, 89%, 90%, 91%, 92%, 93%, 94%, 95%, 96%, 97%, 98%, 99%, or more sequence identity to a reference sequence corresponding to residues 12 to 343 of SEQ ID NO: 106, or to a reference sequence corresponding to SEQ ID NO: 106, wherein the amino acid sequence comprises one or more substitutions relative to the reference sequence corresponding to residues 12 to 343 of SEQ ID NO: 106, or relative to the reference sequence corresponding to SEQ ID NO: 106.

[0271] In some embodiments, the recombinant polynucleotide comprises a polynucleotide sequence encoding an engineered RNA ligase comprising an amino acid sequence having at least 70%, 75%, 80%, 81%, 82%, 83%, 84%, 85%, 86%, 87%, 88%, 89%, 90%, 91%, 92%, 93%, 94%, 95%, 96%, 97%, 98%, 99%, or more sequence identity to a reference sequence corresponding to residues 12 to 343 of an even-numbered SEQ ID NO of SEQ ID NOs: 218-220 and 224-252, or to a reference sequence corresponding to an even-numbered SEQ ID NO of SEQ ID NOs: 218-220 and 224-252, wherein the amino acid sequence comprises one or more substitutions relative to the reference sequence corresponding to residues 12 to 343 of SEQ ID NO: 106, or relative to the reference sequence corresponding to SEQ ID NO: 106.

[0272] In some embodiments, the recombinant polynucleotide comprises a polynucleotide sequence encoding an engineered RNA ligase comprising an amino acid sequence comprising at least a substitution or substitution set at amino acid position(s) 38/71/114/184/191/196, 141/170/171/174, 114, 57/60/170/171/174/192/196/320, 60/92/170/171, 141/174/196, 57/170/171/174, 141/184, 57/60/141/170/171/174/192, 60/170/174, 141/170/171, 69/71/114/184, 38/40, 40/71/98/184/259, 32/60/141/170/171/174/196/320, 32/170/207/320, or 196, wherein the amino acid positions are relative to the reference sequence corresponding to residues 12 to 343 of SEQ ID NO: 106, or relative to the reference sequence corresponding to SEQ ID NO: 106.

[0273] In some embodiments, the recombinant polynucleotide comprises a polynucleotide sequence encoding an engineered RNA ligase comprising an amino acid sequence having at least 70%, 75%, 80%, 81%, 82%, 83%, 84%, 85%, 86%, 87%, 88%, 89%, 90%, 91%, 92%, 93%, 94%, 95%, 96%, 97%, 98%, 99%, or more sequence identity to a reference sequence corresponding to residues 12 to 343 of SEQ ID NO: 218, or to a reference sequence corresponding to SEQ ID NO: 218, wherein the amino acid sequence comprises one or more substitutions relative to the reference sequence corresponding to residues 12 to 343 of SEQ ID NO: 218, or relative to the reference sequence corresponding to SEQ ID NO: 218.

[0274] In some embodiments, the recombinant polynucleotide comprises a polynucleotide sequence encoding an engineered RNA ligase comprising an amino acid sequence having at least 70%, 75%, 80%, 81%, 82%, 83%, 84%, 85%, 86%, 87%, 88%, 89%, 90%, 91%, 92%, 93%, 94%, 95%, 96%, 97%, 98%, 99%, or more sequence identity to a reference sequence corresponding to residues 12 to 343 of an even-numbered SEQ ID NO of SEQ ID NOs: 270-312, or to a reference sequence corresponding to an even-numbered SEQ ID NO of SEQ ID NOs: 270-312, wherein the amino acid sequence comprises one or more substitutions relative to the reference sequence corresponding to residues 12 to 343 of SEQ ID NO: 218, or relative to the reference sequence corresponding to SEQ ID NO: 218.

[0275] In some embodiments, the recombinant polynucleotide comprises a polynucleotide sequence encoding an engineered RNA ligase comprising an amino acid sequence comprising at least a substitution or substitution set at amino acid position(s) 102, 17, 190, 16, 68, 23, 270, 117/229, or 117, wherein the amino acid positions are relative to the reference sequence corresponding to residues 12 to 343 of SEQ ID NO: 218, or relative to the reference sequence corresponding to SEQ ID NO: 218.

[0276] In some embodiments, the recombinant polynucleotide comprises a polynucleotide sequence encoding an engineered RNA ligase comprising an amino acid sequence having at least 70%, 75%, 80%, 81%, 82%, 83%, 84%, 85%, 86%, 87%, 88%, 89%, 90%, 91%, 92%, 93%, 94%, 95%, 96%, 97%, 98%, 99%, or more sequence identity to a reference sequence corresponding to residues 12 to 343 of SEQ ID NO: 286, or to a reference sequence corresponding to SEQ ID NO: 286, wherein the amino acid sequence comprises one or more substitutions relative to the reference sequence corresponding to residues 12 to 343 of SEQ ID NO: 286, or relative to the reference sequence corresponding to SEQ ID NO: 286.

[0277] In some embodiments, the recombinant polynucleotide comprises a polynucleotide sequence encoding an engineered RNA ligase comprising an amino acid sequence having at least 70%, 75%, 80%, 81%, 82%, 83%, 84%, 85%, 86%, 87%, 88%, 89%, 90%, 91%, 92%, 93%, 94%, 95%, 96%, 97%, 98%, 99%, or more sequence identity to a reference sequence corresponding to residues 12 to 343 of an even-numbered SEQ ID NO of SEQ ID NOs: 314-426, or to a reference sequence corresponding to an even-numbered SEQ ID NO of SEQ ID NOs: 314-426, wherein the amino acid sequence comprises one or more substitutions relative to the reference sequence corresponding to residues 12 to 343 of SEQ ID NO: 286, or relative to the reference sequence corresponding to SEQ ID NO: 286.

[0278] In some embodiments, the recombinant polynucleotide comprises a polynucleotide sequence encoding an engineered RNA ligase comprising an amino acid sequence comprising at least a substitution or substitution set at amino acid position(s) 296, 114/117, 26, 30, 117/118, 117/119, 14, 183, 117, 185, 307, 12, 93/135, 135, 92, 288, 117/120, 79, 100, 287, 292, 25, 75, 327, or 111, wherein the amino acid positions are relative to the reference sequence corresponding to residues 12 to 343 of SEQ ID NO: 286, or relative to the reference sequence corresponding to SEQ ID NO: 286.

[0279] In some embodiments, the recombinant polynucleotide comprises a polynucleotide sequence encoding an engineered RNA ligase comprising an amino acid sequence having at least 70%, 75%, 80%, 81%, 82%, 83%, 84%, 85%, 86%, 87%, 88%, 89%, 90%, 91%, 92%, 93%, 94%, 95%, 96%, 97%, 98%, 99%, or more sequence identity to a reference sequence corresponding to residues 12 to 343 of SEQ ID NO: 396, or to a reference sequence corresponding to SEQ ID NO: 396, wherein the amino acid sequence comprises one or more substitutions relative to the reference sequence corresponding to residues 12 to 343 of SEQ ID NO: 396, or relative to the reference sequence corresponding to SEQ ID NO: 396.

[0280] In some embodiments, the recombinant polynucleotide comprises a polynucleotide sequence encoding an engineered RNA ligase comprising an amino acid sequence having at least 70%, 75%, 80%, 81%, 82%, 83%, 84%, 85%, 86%, 87%, 88%, 89%, 90%, 91%, 92%, 93%, 94%, 95%, 96%, 97%, 98%, 99%, or more sequence identity to a reference sequence corresponding to residues 12 to 343 of an even-numbered SEQ ID NO of SEQ ID NOs: 428-488, or to a reference sequence corresponding to an even-numbered SEQ ID NO of SEQ ID NOs: 428-488, wherein the amino acid sequence comprises one or more substitutions relative to the reference sequence corresponding to residues 12 to 343 of SEQ ID NO: 396, or relative to the reference sequence corresponding to SEQ ID NO: 396.

[0281] In some embodiments, the recombinant polynucleotide comprises a polynucleotide sequence encoding an engineered RNA ligase comprising an amino acid sequence comprising at least a substitution or substitution set at amino acid position(s) 102/119, 75/102, 75/102/117, 75/119, 75/136/296, 75/327, 75/117/119, 119, 119/296, 14/102/119, 14/102/296, 14/75, 14/75/119, 14/75/119/327, 14/75/117/119, 14/75/117/119/296, 14/119, 14/296, 14/30/270, 14/25, 14/117, 14/117/119, 14/117/119/296, 14/117/296/327, 26/75/327, 25/75, 25/30/102, 117, 117/119, or 117/119/296, wherein the amino acid positions are relative to the reference sequence corresponding to residues 12 to 343 of SEQ ID NO: 396, or relative to the reference sequence corresponding to SEQ ID NO: 396.

[0282] In some embodiments, the recombinant polynucleotide comprises a polynucleotide sequence encoding an engineered RNA ligase comprising an amino acid sequence having at least 70%, 75%, 80%, 81%, 82%, 83%, 84%, 85%, 86%, 87%, 88%, 89%, 90%, 91%, 92%, 93%, 94%, 95%, 96%, 97%, 98%, 99%, or more sequence identity to a reference sequence corresponding to residues 12 to 343 of SEQ ID NO: 436, or to a reference sequence corresponding to SEQ ID NO: 436, wherein the amino acid sequence comprises one or more substitutions relative to the reference sequence corresponding to residues 12 to 343 of SEQ ID NO: 436, or relative to the reference sequence corresponding to SEQ ID NO: 436.

[0283] In some embodiments, the recombinant polynucleotide comprises a polynucleotide sequence encoding an engineered RNA ligase comprising an amino acid sequence having at least 70%, 75%, 80%, 81%, 82%, 83%, 84%, 85%, 86%, 87%, 88%, 89%, 90%, 91%, 92%, 93%, 94%, 95%, 96%, 97%, 98%, 99%, or more sequence identity to a reference sequence corresponding to residues 12 to 343 of an even-numbered SEQ ID NO of SEQ ID NOs: 490-534, or to a reference sequence corresponding to an even-numbered SEQ ID NO of SEQ ID NOs: 490-534, wherein the amino acid sequence comprises one or more substitutions relative to the reference sequence corresponding to residues 12 to 343 of SEQ ID NO: 436, or relative to the reference sequence corresponding to SEQ ID NO: 436.

[0284] In some embodiments, the recombinant polynucleotide comprises a polynucleotide sequence encoding an engineered RNA ligase comprising an amino acid sequence comprising at least a substitution at amino acid position 332, 156, 177, 333, 96, 11, 189, 327, 25, 73, 98, 335, 95, 188, or 52, or combinations thereof, wherein the amino acid positions are relative to the reference sequence corresponding to residues 12 to 343 of SEQ ID NO: 436, or relative to the reference sequence corresponding to SEQ ID NO: 436.

[0285] In some embodiments, the recombinant polynucleotide comprises a polynucleotide sequence encoding an engineered RNA ligase comprising an amino acid sequence having at least 70%, 75%, 80%, 81%, 82%, 83%, 84%, 85%, 86%, 87%, 88%, 89%, 90%, 91%, 92%, 93%, 94%, 95%, 96%, 97%, 98%, 99%, or more sequence identity to a reference sequence corresponding to residues 12 to 343 of SEQ ID NO: 520, or to a reference sequence corresponding to SEQ ID NO: 520, wherein the amino acid sequence comprises one or more substitutions relative to the reference sequence corresponding to residues 12 to 343 of SEQ ID NO: 520, or relative to the reference sequence corresponding to SEQ ID NO: 520.

[0286] In some embodiments, the recombinant polynucleotide comprises a polynucleotide sequence encoding an engineered RNA ligase comprising an amino acid sequence having at least 70%, 75%, 80%, 81%, 82%, 83%, 84%, 85%, 86%, 87%, 88%, 89%, 90%, 91%, 92%, 93%, 94%, 95%, 96%, 97%, 98%, 99%, or more sequence identity to a reference sequence corresponding to residues 12 to 343 of an even-numbered SEQ ID NO of SEQ ID NOs: 536-554, or to a reference sequence corresponding to an even-numbered SEQ ID NO of SEQ ID NOs: 536-554, wherein the amino acid sequence comprises one or more substitutions relative to the reference sequence corresponding to residues 12 to 343 of SEQ ID NO: 520, or relative to the reference sequence corresponding to SEQ ID NO: 520.

[0287] In some embodiments, the recombinant polynucleotide comprises a polynucleotide sequence encoding an engineered RNA ligase comprising an amino acid sequence comprising at least a substitution set at amino acid positions 96/98/156/189/335, 73/96/98/189/335, 73/177/189, 73/98/177/189/335, 25/73/95/96/98/189/327, 25/98/189, 73/95/96/156/177, 73/335, 73/96/98/156/335, or 73/177/189/333, wherein the amino acid positions are relative to the reference sequence corresponding to residues 12 to 343 of SEQ ID NO: 520, or relative to the reference sequence corresponding to SEQ ID NO: 520.

[0288] In some embodiments, the recombinant polynucleotide comprises a polynucleotide sequence encoding an engineered RNA ligase comprising an amino acid sequence having at least 70%, 75%, 80%, 81%, 82%, 83%, 84%, 85%, 86%, 87%, 88%, 89%, 90%, 91%, 92%, 93%, 94%, 95%, 96%, 97%, 98%, 99%, or more sequence identity to a reference sequence corresponding to residues 12 to 343 of SEQ ID NO: 552, or to a reference sequence corresponding to SEQ ID NO: 552, wherein the amino acid sequence comprises one or more substitutions relative to the reference sequence corresponding to residues 12 to 343 of SEQ ID NO: 552, or relative to the reference sequence corresponding to SEQ ID NO: 552.

[0289] In some embodiments, the recombinant polynucleotide comprises a polynucleotide sequence encoding an engineered RNA ligase comprising an amino acid sequence having at least 70%, 75%, 80%, 81%, 82%, 83%, 84%, 85%, 86%, 87%, 88%, 89%, 90%, 91%, 92%, 93%, 94%, 95%, 96%, 97%, 98%, 99%, or more sequence identity to a reference sequence corresponding to residues 12 to 343 of an even-numbered SEQ ID NO of SEQ ID NOs: 556-584, or to a reference sequence corresponding to an even-numbered SEQ ID NO of SEQ ID NOs: 556-584, wherein the amino acid sequence comprises one or more substitutions relative to the reference sequence corresponding to residues 12 to 343 of SEQ ID NO: 552, or relative to the reference sequence corresponding to SEQ ID NO: 552.

[0290] In some embodiments, the recombinant polynucleotide comprises a polynucleotide sequence encoding an engineered RNA ligase comprising an amino acid sequence comprising at least a substitution at amino acid position 292, 147, 255, 295, 75, 300, 333, 200, 289, 95, or 168, or combinations thereof, wherein the amino acid positions are relative to the reference sequence corresponding to residues 12 to 343 of SEQ ID NO: 552, or relative to the reference sequence corresponding to SEQ ID NO: 552.

[0291] In some embodiments, the recombinant polynucleotide comprises a polynucleotide sequence encoding an engineered RNA ligase comprising an amino acid sequence having at least 70%, 75%, 80%, 81%, 82%, 83%, 84%, 85%, 86%, 87%, 88%, 89%, 90%, 91%, 92%, 93%, 94%, 95%, 96%, 97%, 98%, 99%, or more sequence identity to a reference sequence corresponding to residues 12 to 343 of SEQ ID NO: 582, or to a reference sequence corresponding to SEQ ID NO: 582, wherein the amino acid sequence comprises one or more substitutions relative to the reference sequence corresponding to residues 12 to 343 of SEQ ID NO: 582, or relative to the reference sequence corresponding to SEQ ID NO: 582.

[0292] In some embodiments, the recombinant polynucleotide comprises a polynucleotide sequence encoding an engineered RNA ligase comprising an amino acid sequence having at least 70%, 75%, 80%, 81%, 82%, 83%, 84%, 85%, 86%, 87%, 88%, 89%, 90%, 91%, 92%, 93%, 94%, 95%, 96%, 97%, 98%, 99%, or more sequence identity to a reference sequence corresponding to residues 12 to 343 of an even-numbered SEQ ID NO of SEQ ID NOs: 586-958, or to a reference sequence corresponding to an even-numbered SEQ ID NO of SEQ ID NOs: 586-958, wherein the amino acid sequence comprises one or more substitutions relative to the reference sequence corresponding to residues 12 to 343 of SEQ ID NO: 582, or relative to the reference sequence corresponding to SEQ ID NO: 582.

[0293] In some embodiments, the recombinant polynucleotide comprises a polynucleotide sequence encoding an engineered RNA ligase comprising an amino acid sequence comprising at least a substitution or substitution set at amino acid position(s) 95/156/337, 189/200/271, 200/271/289/337, 200/271/289, 189/200, 156/200/289, 156/168/189/271/300, 156/189/200/289, 156/168/289, 95/156/271/289, 156/333, 95/200/289/337, 168/200/289, 189/200/289, 333/337, 103/156/271, 95/156/200/300/333, 156/271/289/333, 95/156/271, 95/189/289, 95/156/168/189/271/289/300, 189/271/289, 95/168/271/300, 156/189/289/337, 200/271, 156/189/333, 189/289, 156/189/200/300/333/337, 156/189/200/271/289/337, 156/200/271/289/333/337, 168/271/300, 289/337, 156/168/337, 156/168/189/289, 156/271/289, 189/300, 156/289/300/337, 168/189/289, 95/156/168/300, 156/200/300/337, 289/333/337, 95/189/200/300/337, 95/156/189/200/271/333, 200/271/289/300, 289/333, 189/271/300, 95/300, 95/189/333/337, 95/189/271/300, 95/189/200/289, 168, 156/200/271/289/337, 95/168/289, 156/289, 95/156/189/271/289, 156/168/189/200/289/333, 156/300/333/337, 95/156/189/200/271/337, 271, 156/271, 156/271/300/333, 95/168/200, 168/271, 95/200/333, 189/200/271/289/333, 95/168/189/333/337, 189, 189/333/337, 156/189/271/289/333, 289, 95/156/200/271/289, 289/300/333, 95/189/289/337, 95/156/168/189/289, 271/289, 333, 168/337, 156/189/271/289, 95/156/189/337, 156/189/271/300, 156/168/289/333, 168/189/289/333, 95/333, 333/343, 156/189/289, 95/289/300, 95/156/189/200/300/333/337, 189/200/271/289/337, 95/156/168/189/289/337, 95/289, 156/289/333/337, 156/289/337, 337, 168/289, 95/156/300, 95/156/289, 95/189/271/333/337, 95/168/300, 95/156/168/271/333/337, 95/189/289/333/337, 156/168/200/289/334, 95/156/168/189/271/289, 156/189/200/289/337, 200/289, 200/289/333/337, 95/168/189/200/289, 168/200, 156/168/271/289, 189/206/289, 156/200/289/333/335, 156/200/289/333, 189/200/289/333, 189/289/335, 189/254/289/333, 167/189/206/289/333/335, 156/200/333, 156/200/289/335, 156/189/289/335, 335, 156/167/189/289, 156/189/200/289/335, 200/289/333/335, 156/189/200/289/333, 254/333/335, 189/254/333/335, 189/335, 156/189/254/289, 156/289/333, 289/335, 189/200/254/289/333, 156/189/289/333, 25/156/189/289, 156/189/206/289/333/335, 289/333/335, 156/254/289/333, 156/289/333/335, 254/289, 200/289/333, 156/189/200, 156/254/333/335, 156, 254/289/335, 156/206/289, 156/289/335, 206/289/333/335, 156/189/254/289/333, 156/254/289, 200/289/335, 156/189/206/289, 156/189/200/206/254/289/333, 25/254/333, 189/289/333/335, 156/189/200/289/333/335, 254/289/333, or 156/200/333/335, wherein the amino acid positions are relative to the reference sequence corresponding to residues 12 to 343 of SEQ ID NO: 582, or relative to the reference sequence corresponding to SEQ ID NO: 582.

[0294] In some embodiments, the recombinant polynucleotide comprises a polynucleotide sequence encoding an engineered RNA ligase comprising an amino acid sequence comprising at least a substitution at an amino acid position set forth in Tables 3, 4, 5, 6, 7.1, 7.2, 8, 9, 10, 11.3, 11.4, and 12, wherein the amino acid positions are relative to the reference sequence corresponding to residues 12 to 343 of SEQ ID NO: 2, 4, 106, 218, 286, 396, 436, 520, 552, or 582, or relative to the reference sequence corresponding to SEQ ID NO: 2, 4, 106, 218, 286, 396, 436, 520, 552, or 582.

[0295] In some embodiments, the recombinant polynucleotide comprises a polynucleotide sequence encoding an engineered RNA ligase comprising an amino acid sequence comprising at least one substitution set forth in Tables 3, 4, 5, 6, 7.1, 7.2, 8, 9, 10, 11.3, 11.4, and 12, wherein the amino acid positions are relative to the reference sequence corresponding to residues 12 to 343 of SEQ ID NO: 2, 4, 106, 218, 286, 396, 436, 520, 552, or 582, or relative to the reference sequence corresponding to SEQ ID NO: 2, 4, 106, 218, 286, 396, 436, 520, 552, or 582.

[0296] In some embodiments, the recombinant polynucleotide comprises a polynucleotide sequence encoding an engineered RNA ligase comprising an amino acid sequence comprising at least a substitution or substitution set at amino acid position(s) set forth in 3, 4, 5, 6, 7.1, 7.2, 8, 9, 10, 11.3, 11.4, and 12, wherein the amino acid positions are relative to the reference sequence corresponding to residues 12 to 343 of SEQ ID NO: 2, 4, 106, 218, 286, 396, 436, 520, 552, or 582, or relative to the reference sequence corresponding to SEQ ID NO: 2, 4, 106, 218, 286, 396, 436, 520, 552, or 582.

[0297] In some embodiments, the recombinant polynucleotide comprises a polynucleotide sequence encoding an engineered RNA ligase comprising an amino acid sequence comprising at least a substitution or substitution set of an RNA ligase variant set forth in Tables 3, 4, 5, 6, 7.1, 7.2, 8, 9, 10, 11.3, 11.4, and 12, wherein the amino acid positions are relative to the reference sequence corresponding to residues 12 to 343 of SEQ ID NO: 2, 4, 106, 218, 286, 396, 436, 520, 552, or 582, or relative to the reference sequence corresponding to SEQ ID NO: 2, 4, 106, 218, 286, 396, 436, 520, 552, or 582.

[0298] In some embodiments, the recombinant polynucleotide comprises a polynucleotide sequence encoding an engineered RNA ligase comprising an amino acid sequence at least 70%, 75%, 80%, 81%, 82%, 83%, 84%, 85%, 86%, 87%, 88%, 89%, 90%, 91%, 92%, 93%, 94%, 95%, 96%, 97%, 98%, 99%, or more sequence identity to a reference sequence comprising a substitution or substitution set of an RNA ligase variant set forth in Tables 3, 4, 5, 6, 7.1, 7.2, 8, 9, 10, 11.3, 11.4, and 12, wherein the amino acid positions are relative to the reference sequence corresponding to residues 12 to 343 of SEQ ID NO: 2, 4, 106, 218, 286, 396, 436, 520, 552, or 582, or relative to the reference sequence corresponding to SEQ ID NO: 2, 4, 106, 218, 286, 396, 436, 520, 552, or 582.

[0299] In some embodiments, the recombinant polynucleotide comprises a polynucleotide sequence encoding an engineered RNA ligase comprising an amino acid sequence comprising residues 12 to 343 of an even numbered SEQ ID NO. of SEQ ID NOs: 4-220, 224-252, and 270-958, or an amino acid sequence comprising an even numbered SEQ ID NO. of SEQ ID NOs: 4-220, 224-252, and 270-958.

[0300] In some embodiments, the recombinant polynucleotide comprises a polynucleotide sequence encoding an engineered RNA ligase comprising an amino acid sequence comprising residues 12 to 343 of SEQ ID NO: 2, 4, 106, 218, 286, 396, 436, 520, 552, or 582, or an amino acid sequence comprising SEQ ID NO: 2, 4, 106, 218, 286, 396, 436, 520, 552, or 582.

[0301] In some embodiments, the recombinant polynucleotide comprises a polynucleotide sequence having at least 70%, 75%, 80%, 81%, 82%, 83%, 84%, 85%, 86%, 87%, 88%, 89%, 90%, 91%, 92%, 93%, 94%, 95%, 96%, 97%, 98%, 99%, or more sequence identity to a reference polynucleotide sequence corresponding to nucleotide residues 34 to 1029 of an odd-numbered SEQ ID NO. of SEQ ID NO: 3, 105, 217, 285, 395, 435, 519, 551, or 581, or to a reference polynucleotide sequence corresponding to SEQ ID NO: 3, 105, 217, 285, 395, 435, 519, 551, or 581, wherein the recombinant polynucleotide encodes an RNA ligase.

[0302] In some embodiments, the recombinant polynucleotide comprises a polynucleotide sequence having at least 70%, 75%, 80%, 81%, 82%, 83%, 84%, 85%, 90%, 91%, 92%, 93%, 94%, 95%, 96%, 97%, 98%, 99%, or more sequence identity to a reference polynucleotide sequence corresponding to nucleotide residues 34 to 1029 of an odd numbered SEQ ID NO. of SEQ ID NOs: 3-219, 223-251, and 269-957, or to a reference polynucleotide sequence corresponding an odd numbered SEQ ID NO. of SEQ ID NOs: 3-219, 223-251, and 269-957, wherein the recombinant polynucleotide encodes an RNA ligase.

[0303] In some embodiments, the recombinant polynucleotide comprises a polynucleotide sequence having at least 70%, 75%, 80%, 81%, 82%, 83%, 84%, 85%, 86%, 87%, 88%, 89%, 90%, 91%, 92%, 93%, 94%, 95%, 96%, 97%, 98%, 99%, or more sequence identity to the reference sequence corresponding to nucleotide residues 34 to 1029 of SEQ ID NO: 3, 5, 7, 9, 11, 13, 15, 17, 19, 21, 23, 25, 27, 29, 31, 33, 35, 37, 39, 41, 43, 45, 47, 49, 51, 53, 55, 57, 59, 61, 63, 65, 67, 69, 71, 73, 75, 77, 79, 81, 83, 85, 87, 89, 91, 93, 95, 97, 99, 101, 103, 105, 107, 109, 111, 113, 115, 117, 119, 121, 123, 125, 127, 129, 131, 133, 135, 137, 139, 141, 143, 145, 147, 149, 151, 153, 155, 157, 159, 161, 163, 165, 167, 169, 171, 173, 175, 177, 179, 181, 183, 185, 187, 189, 191, 193, 195, 197, 199, 201, 203, 205, 207, 209, 211, 213, 215, 217, 219, 221, 223, 225, 227, 229, 231, 233, 235, 237, 239, 241, 243, 245, 247, 249, 251, 269, 271, 273, 275, 277, 279, 281, 283, 285, 287, 289, 291, 293, 295, 297, 299, 301, 303, 305, 307, 309, 311, 313, 315, 317, 319, 321, 323, 325, 327, 329, 331, 333, 335, 337, 339, 341, 343, 345, 347, 349, 351, 353, 355, 357, 359, 361, 363, 365, 367, 369, 371, 373, 375, 377, 379, 381, 383, 385, 387, 389, 391, 393, 395, 397, 399, 401, 403, 405, 407, 409, 411, 413, 415, 417, 419, 421, 423, 425, 427, 429, 431, 433, 435, 437, 439, 441, 443, 445, 447, 449, 451, 453, 455, 457, 459, 461, 463, 465, 467, 469, 471, 473, 475, 477, 479, 481, 483, 485, 487, 489, 491, 493, 495, 497, 499, 501, 503, 505, 507, 509, 511, 513, 515, 517, 519, 521, 523, 525, 527, 529, 531, 533, 535, 537, 539, 541, 543, 545, 547, 549, 551, 553, 555, 557, 559, 561, 563, 565, 567, 569, 571, 573, 575, 577, 579, 581, 583, 585, 587, 589, 591, 593, 595, 597, 599, 601, 603, 605, 607, 609, 611, 613, 615, 617, 619, 621, 623, 625, 627, 629, 631, 633, 635, 637, 639, 641, 643, 645, 647, 649, 651, 653, 655, 657, 659, 661, 663, 665, 667, 669, 671, 673, 675, 677, 679, 681, 683, 685, 687, 689, 691, 693, 695, 697, 699, 701, 703, 705, 707, 709, 711, 713, 715, 717, 719, 721, 723, 725, 727, 729, 731, 733, 735, 737, 739, 741, 743, 745, 747, 749, 751, 753, 755, 757, 759, 761, 763, 765, 767, 769, 771, 773, 775, 777, 779, 781, 783, 785, 787, 789, 791, 793, 795, 797, 799, 801, 803, 805, 807, 809, 811, 813, 815, 817, 819, 821, 823, 825, 827, 829, 831, 833, 835, 837, 839, 841, 843, 845, 847, 849, 851, 853, 855, 857, 859, 861, 863, 865, 867, 869, 871, 873, 875, 877, 879, 881, 883, 885, 887, 889, 891, 893, 895, 897, 899, 901, 903, 905, 907, 909, 911, 913, 915, 917, 919, 921, 923, 925, 927, 929, 931, 933, 935, 937, 939, 941, 943, 945, 947, 949, 951, 953, 955, or 957, wherein the recombinant polynucleotide encodes an RNA ligase.

[0304] In some embodiments, the recombinant polynucleotide comprises a polynucleotide sequence having at least 70%, 75%, 80%, 81%, 82%, 83%, 84%, 85%, 86%, 87%, 88%, 89%, 90%, 91%, 92%, 93%, 94%, 95%, 96%, 97%, 98%, 99% or more sequence identity to the reference sequence corresponding to SEQ ID NO: 3, 5, 7, 9, 11, 13, 15, 17, 19, 21, 23, 25, 27, 29, 31, 33, 35, 37, 39, 41, 43, 45, 47, 49, 51, 53, 55, 57, 59, 61, 63, 65, 67, 69, 71, 73, 75, 77, 79, 81, 83, 85, 87, 89, 91, 93, 95, 97, 99, 101, 103, 105, 107, 109, 111, 113, 115, 117, 119, 121, 123, 125, 127, 129, 131, 133, 135, 137, 139, 141, 143, 145, 147, 149, 151, 153, 155, 157, 159, 161, 163, 165, 167, 169, 171, 173, 175, 177, 179, 181, 183, 185, 187, 189, 191, 193, 195, 197, 199, 201, 203, 205, 207, 209, 211, 213, 215, 217, 219, 221, 223, 225, 227, 229, 231, 233, 235, 237, 239, 241, 243, 245, 247, 249, 251, 269, 271, 273, 275, 277, 279, 281, 283, 285, 287, 289, 291, 293, 295, 297, 299, 301, 303, 305, 307, 309, 311, 313, 315, 317, 319, 321, 323, 325, 327, 329, 331, 333, 335, 337, 339, 341, 343, 345, 347, 349, 351, 353, 355, 357, 359, 361, 363, 365, 367, 369, 371, 373, 375, 377, 379, 381, 383, 385, 387, 389, 391, 393, 395, 397, 399, 401, 403, 405, 407, 409, 411, 413, 415, 417, 419, 421, 423, 425, 427, 429, 431, 433, 435, 437, 439, 441, 443, 445, 447, 449, 451, 453, 455, 457, 459, 461, 463, 465, 467, 469, 471, 473, 475, 477, 479, 481, 483, 485, 487, 489, 491, 493, 495, 497, 499, 501, 503, 505, 507, 509, 511, 513, 515, 517, 519, 521, 523, 525, 527, 529, 531, 533, 535, 537, 539, 541, 543, 545, 547, 549, 551, 553, 555, 557, 559, 561, 563, 565, 567, 569, 571, 573, 575, 577, 579, 581, 583, 585, 587, 589, 591, 593, 595, 597, 599, 601, 603, 605, 607, 609, 611, 613, 615, 617, 619, 621, 623, 625, 627, 629, 631, 633, 635, 637, 639, 641, 643, 645, 647, 649, 651, 653, 655, 657, 659, 661, 663, 665, 667, 669, 671, 673, 675, 677, 679, 681, 683, 685, 687, 689, 691, 693, 695, 697, 699, 701, 703, 705, 707, 709, 711, 713, 715, 717, 719, 721, 723, 725, 727, 729, 731, 733, 735, 737, 739, 741, 743, 745, 747, 749, 751, 753, 755, 757, 759, 761, 763, 765, 767, 769, 771, 773, 775, 777, 779, 781, 783, 785, 787, 789, 791, 793, 795, 797, 799, 801, 803, 805, 807, 809, 811, 813, 815, 817, 819, 821, 823, 825, 827, 829, 831, 833, 835, 837, 839, 841, 843, 845, 847, 849, 851, 853, 855, 857, 859, 861, 863, 865, 867, 869, 871, 873, 875, 877, 879, 881, 883, 885, 887, 889, 891, 893, 895, 897, 899, 901, 903, 905, 907, 909, 911, 913, 915, 917, 919, 921, 923, 925, 927, 929, 931, 933, 935, 937, 939, 941, 943, 945, 947, 949, 951, 953, 955, or 957, wherein the recombinant polynucleotide encodes an RNA ligase.

[0305] In some embodiments, the recombinant polynucleotide comprises a polynucleotide sequence comprising nucleotide residues 34 to 1029 of SEQ ID NO. 3, 105, 217, 285, 395, 435, 519, 551, or 581, or a polynucleotide sequence comprising SEQ ID NOs: 3, 105, 217, 285, 395, 435, 519, 551, or 581.

[0306] In some embodiments, the recombinant polynucleotide comprises a polynucleotide sequence comprising nucleotide residues 34 to 1029 of an odd numbered SEQ ID NO. of SEQ ID NOs: 3-219, 223-251, and 269-957, or a polynucleotide sequence comprising an odd numbered SEQ ID NO. of SEQ ID NOs: 3-219, 223-251, and 269-957.

[0307] In some embodiments, the recombinant polynucleotide comprises a polynucleotide sequence comprising nucleotide residues 34 to 1029 of SEQ ID NO: 3, 5, 7, 9, 11, 13, 15, 17, 19, 21, 23, 25, 27, 29, 31, 33, 35, 37, 39, 41, 43, 45, 47, 49, 51, 53, 55, 57, 59, 61, 63, 65, 67, 69, 71, 73, 75, 77, 79, 81, 83, 85, 87, 89, 91, 93, 95, 97, 99, 101, 103, 105, 107, 109, 111, 113, 115, 117, 119, 121, 123, 125, 127, 129, 131, 133, 135, 137, 139, 141, 143, 145, 147, 149, 151, 153, 155, 157, 159, 161, 163, 165, 167, 169, 171, 173, 175, 177, 179, 181, 183, 185, 187, 189, 191, 193, 195, 197, 199, 201, 203, 205, 207, 209, 211, 213, 215, 217, 219, 221, 223, 225, 227, 229, 231, 233, 235, 237, 239, 241, 243, 245, 247, 249, 251, 269, 271, 273, 275, 277, 279, 281, 283, 285, 287, 289, 291, 293, 295, 297, 299, 301, 303, 305, 307, 309, 311, 313, 315, 317, 319, 321, 323, 325, 327, 329, 331, 333, 335, 337, 339, 341, 343, 345, 347, 349, 351, 353, 355, 357, 359, 361, 363, 365, 367, 369, 371, 373, 375, 377, 379, 381, 383, 385, 387, 389, 391, 393, 395, 397, 399, 401, 403, 405, 407, 409, 411, 413, 415, 417, 419, 421, 423, 425, 427, 429, 431, 433, 435, 437, 439, 441, 443, 445, 447, 449, 451, 453, 455, 457, 459, 461, 463, 465, 467, 469, 471, 473, 475, 477, 479, 481, 483, 485, 487, 489, 491, 493, 495, 497, 499, 501, 503, 505, 507, 509, 511, 513, 515, 517, 519, 521, 523, 525, 527, 529, 531, 533, 535, 537, 539, 541, 543, 545, 547, 549, 551, 553, 555, 557, 559, 561, 563, 565, 567, 569, 571, 573, 575, 577, 579, 581, 583, 585, 587, 589, 591, 593, 595, 597, 599, 601, 603, 605, 607, 609, 611, 613, 615, 617, 619, 621, 623, 625, 627, 629, 631, 633, 635, 637, 639, 641, 643, 645, 647, 649, 651, 653, 655, 657, 659, 661, 663, 665, 667, 669, 671, 673, 675, 677, 679, 681, 683, 685, 687, 689, 691, 693, 695, 697, 699, 701, 703, 705, 707, 709, 711, 713, 715, 717, 719, 721, 723, 725, 727, 729, 731, 733, 735, 737, 739, 741, 743, 745, 747, 749, 751, 753, 755, 757, 759, 761, 763, 765, 767, 769, 771, 773, 775, 777, 779, 781, 783, 785, 787, 789, 791, 793, 795, 797, 799, 801, 803, 805, 807, 809, 811, 813, 815, 817, 819, 821, 823, 825, 827, 829, 831, 833, 835, 837, 839, 841, 843, 845, 847, 849, 851, 853, 855, 857, 859, 861, 863, 865, 867, 869, 871, 873, 875, 877, 879, 881, 883, 885, 887, 889, 891, 893, 895, 897, 899, 901, 903, 905, 907, 909, 911, 913, 915, 917, 919, 921, 923, 925, 927, 929, 931, 933, 935, 937, 939, 941, 943, 945, 947, 949, 951, 953, 955, or 957.

[0308] In some embodiments, the recombinant polynucleotide comprises a polynucleotide sequence comprising SEQ ID NO: 3, 5, 7, 9, 11, 13, 15, 17, 19, 21, 23, 25, 27, 29, 31, 33, 35, 37, 39, 41, 43, 45, 47, 49, 51, 53, 55, 57, 59, 61, 63, 65, 67, 69, 71, 73, 75, 77, 79, 81, 83, 85, 87, 89, 91, 93, 95, 97, 99, 101, 103, 105, 107, 109, 111, 113, 115, 117, 119, 121, 123, 125, 127, 129, 131, 133, 135, 137, 139, 141, 143, 145, 147, 149, 151, 153, 155, 157, 159, 161, 163, 165, 167, 169, 171, 173, 175, 177, 179, 181, 183, 185, 187, 189, 191, 193, 195, 197, 199, 201, 203, 205, 207, 209, 211, 213, 215, 217, 219, 221, 223, 225, 227, 229, 231, 233, 235, 237, 239, 241, 243, 245, 247, 249, 251, 269, 271, 273, 275, 277, 279, 281, 283, 285, 287, 289, 291, 293, 295, 297, 299, 301, 303, 305, 307, 309, 311, 313, 315, 317, 319, 321, 323, 325, 327, 329, 331, 333, 335, 337, 339, 341, 343, 345, 347, 349, 351, 353, 355, 357, 359, 361, 363, 365, 367, 369, 371, 373, 375, 377, 379, 381, 383, 385, 387, 389, 391, 393, 395, 397, 399, 401, 403, 405, 407, 409, 411, 413, 415, 417, 419, 421, 423, 425, 427, 429, 431, 433, 435, 437, 439, 441, 443, 445, 447, 449, 451, 453, 455, 457, 459, 461, 463, 465, 467, 469, 471, 473, 475, 477, 479, 481, 483, 485, 487, 489, 491, 493, 495, 497, 499, 501, 503, 505, 507, 509, 511, 513, 515, 517, 519, 521, 523, 525, 527, 529, 531, 533, 535, 537, 539, 541, 543, 545, 547, 549, 551, 553, 555, 557, 559, 561, 563, 565, 567, 569, 571, 573, 575, 577, 579, 581, 583, 585, 587, 589, 591, 593, 595, 597, 599, 601, 603, 605, 607, 609, 611, 613, 615, 617, 619, 621, 623, 625, 627, 629, 631, 633, 635, 637, 639, 641, 643, 645, 647, 649, 651, 653, 655, 657, 659, 661, 663, 665, 667, 669, 671, 673, 675, 677, 679, 681, 683, 685, 687, 689, 691, 693, 695, 697, 699, 701, 703, 705, 707, 709, 711, 713, 715, 717, 719, 721, 723, 725, 727, 729, 731, 733, 735, 737, 739, 741, 743, 745, 747, 749, 751, 753, 755, 757, 759, 761, 763, 765, 767, 769, 771, 773, 775, 777, 779, 781, 783, 785, 787, 789, 791, 793, 795, 797, 799, 801, 803, 805, 807, 809, 811, 813, 815, 817, 819, 821, 823, 825, 827, 829, 831, 833, 835, 837, 839, 841, 843, 845, 847, 849, 851, 853, 855, 857, 859, 861, 863, 865, 867, 869, 871, 873, 875, 877, 879, 881, 883, 885, 887, 889, 891, 893, 895, 897, 899, 901, 903, 905, 907, 909, 911, 913, 915, 917, 919, 921, 923, 925, 927, 929, 931, 933, 935, 937, 939, 941, 943, 945, 947, 949, 951, 953, 955, or 957.

[0309] In some embodiments, the present disclosure provides a recombinant polynucleotide capable of hybridizing under highly stringent conditions to a reference polynucleotide encoding an engineered RNA ligase polypeptide described herein, e.g., a recombinant polynucleotide provided in Tables 3, 4, 5, 6, 7.1, 7.2, 8, 9, 10, 11.3, 11.4, and 12, or a reverse complement thereof. In some embodiments, the recombinant polynucleotide hybridizes under highly stringent conditions to a reference polynucleotide corresponding to nucleotide residues 34 to 1029 of SEQ ID NO: 3, 105, 217, 285, 395, 435, 519, 551, or 581, or to a reference polynucleotide sequence corresponding to SEQ ID NO: 3, 105, 217, 285, 395, 435, 519, 551, or 581, or a reverse complement thereof. In some embodiments, the recombinant polynucleotide hybridizes under highly stringent conditions to a reference polynucleotide corresponding to nucleotide residues 34 to 1029 of an odd numbered SEQ ID NO. of SEQ ID NOs: 3-219, 223-251, and 269-957, or a polynucleotide sequence comprising an odd numbered SEQ ID NO. of SEQ ID NOs: 3-219, 223-251, and 269-957, or a reverse complement thereof.

[0310] In some embodiments, the present disclosure provides a recombinant polynucleotide capable of hybridizing under highly stringent conditions to a reverse complement of a reference polynucleotide encoding an engineered RNA ligase polypeptide described herein, wherein the recombinant polynucleotide hybridizing under stringent conditions encodes an RNA ligase polypeptide comprising an amino acid sequence having one or more amino acid differences as compared to SEQ ID NO: 2, 4, 106, 218, 286, 396, 436, 520, 552, or 582, at residue positions selected from any positions as set forth in Tables 3, 4, 5, 6, 7.1, 7.2, 8, 9, 10, 11.3, 11.4, and 12. In some embodiments, the recombinant polynucleotide that hybridizes under highly stringent conditions to a reverse complement of a reference polynucleotide encoding an engineered RNA ligase polypeptide described herein encodes an RNA ligase polypeptide having one or more amino acid differences present in an engineered RNA ligase having an amino acid sequence corresponding to residues 12 to 343 of an even numbered SEQ ID NO. of SEQ ID NOs: 4-220, 224-252, and 270-958, or an amino acid sequence comprising an even numbered SEQ ID NO. of SEQ ID NOs: 4-220, 224-252, and 270-958, wherein the amino acid differences are relative to SEQ ID NO: 2, 4, 106, 218, 286, 396, 436, 520, 552, or 582.

[0311] In some embodiments, the recombinant polynucleotide that hybridizes under highly stringent conditions comprises a polynucleotide sequence having at least 70%, 75%, 80%, 81%, 82%, 83%, 84%, 85%, 86%, 87%, 88%, 89%, 90%, 91%, 92%, 93%, 94%, 95%, 96%, 97%, 98%, 99% or more sequence identity to a reference polynucleotide sequence corresponding to nucleotide residues 34 to 1029 of SEQ ID NO: 3, 105, 217, 285, 395, 435, 519, 551, or 581, or to a reference polynucleotide sequence corresponding to SEQ ID NO: 3, 105, 217, 285, 395, 435, 519, 551, or 581, or a reverse complement thereof. In some embodiments, the recombinant polynucleotide that hybridizes under highly stringent conditions comprises a polynucleotide sequence having at least 70%, 75%, 80%, 81%, 82%, 83%, 84%, 85%, 86%, 87%, 88%, 89%, 90%, 91%, 92%, 93%, 94%, 95%, 96%, 97%, 98%, 99% or more sequence identity to a reference polynucleotide sequence corresponding to nucleotide residues 34-1029 of an odd-numbered SEQ ID NO. of SEQ ID NOs: 3-219, 223-251, and 269-957, or an odd-numbered SEQ ID NO. of SEQ ID NOs: 3-219, 223-251, and 269-957, or a reverse complement thereof.

[0312] In some additional embodiments, the polynucleotide hybridizing under highly stringent conditions comprises a polynucleotide sequence having at least 75%, 80%, 81%, 82%, 83%, 84%, 85%, 86%, 87%, 88%, 89%, 90%, 91%, 92%, 93%, 94%, 95%, 96%, 97%, 98%, 99% or more sequence identity to a reverse complement of a polynucleotide reference sequence corresponding to nucleotide residues 34 to 1029 of SEQ ID NO: 3, 105, 217, 285, 395, 435, 519, 551, or 581, or to a reference polynucleotide sequence corresponding to SEQ ID NO: 3, 105, 217, 285, 395, 435, 519, 551, or 581 encodes an engineered RNA ligase polypeptide. In some additional embodiments, the polynucleotide hybridizing under highly stringent conditions comprises a polynucleotide sequence having at least 75%, 80%, 81%, 82%, 83%, 84%, 85%, 86%, 87%, 88%, 89%, 90%, 91%, 92%, 93%, 94%, 95%, 96%, 97%, 98%, 99% or more sequence identity to a reverse complement of a polynucleotide reference sequence corresponding to nucleotide residues 34-1029 of an odd-numbered SEQ ID NO. of SEQ ID NOs: 3-219, 223-251, and 269-957, or an odd-numbered SEQ ID NO. of SEQ ID NOs: 3-219, 223-251, and 269-957 encodes an engineered RNA ligase polypeptide.

[0313] In some embodiments, a recombinant polynucleotide encoding any of the RNA ligase provided herein is manipulated in a variety of ways to provide for expression of the polypeptide. In some embodiments, the recombinant polynucleotide encoding the polypeptides are provided as expression vectors where one or more control sequences is operably linked to the recombinant polynucleotide to regulate the expression of the polynucleotide and/or encoded polypeptide. In some embodiments, the control sequences include, among others, promoter sequences, Kozak sequence, leader sequences, polyadenylation sequences, pro-peptide sequences, signal peptide sequences, regulatory elements, and transcription terminators. The techniques for modifying polynucleotides and nucleic acid sequences utilizing recombinant DNA methods are known in the art.

[0314] In some embodiments, suitable promoters can be selected based on the host cells used. For bacterial host cells, suitable promoters for directing transcription of the nucleic acid constructs of the present disclosure, include, but are not limited to promoters obtained from the E. coli lac operon, Streptomyces coelicolor agarase gene (dagA), Bacillus subtilis levansucrase gene (sacB), Bacillus licheniformis alpha-amylase gene (amyL), Bacillus stearothermophilus maltogenic amylase gene (amyM), Bacillus amyloliquefaciens alpha-amylase gene (amyQ), Bacillus licheniformis penicillinase gene (penP), Bacillus subtilis xylA and xylB genes, and prokaryotic beta-lactamase gene (See e.g., Villa-Kamaroff et al., Proc. Natl Acad. Sci. USA, 1978, 75:3727-3731), as well as the tac promoter (See e.g., DeBoer et al., Proc. Natl Acad. Sci. USA, 1983, 80:21-25). Exemplary promoters for fungal host cells, include, but are not limited to promoters obtained from the genes for Aspergillus oryzae TAKA amylase, Rhizomucor miehei aspartic proteinase, Aspergillus niger neutral alpha-amylase, Aspergillus niger acid stable alpha-amylase, Aspergillus niger or Aspergillus awamori glucoamylase (glaA), Rhizomucor miehei lipase, Aspergillus oryzae alkaline protease, Aspergillus oryzae triose phosphate isomerase, Aspergillus nidulans acetamidase, and Fusarium oxysporum trypsin-like protease (See e.g., WO 96/00787), as well as the NA2-tpi promoter (a hybrid of the promoters from the genes for Aspergillus niger neutral alpha-amylase and Aspergillus oryzae triose phosphate isomerase), and mutant, truncated, and hybrid promoters thereof. Exemplary yeast cell promoters can be from the genes can be from the genes for Saccharomyces cerevisiae enolase (ENO-1), Saccharomyces cerevisiae galactokinase (GAL1), Saccharomyces cerevisiae alcohol dehydrogenase/glyceraldehyde-3-phosphate dehydrogenase (ADH2/GAP), and Saccharomyces cerevisiae 3-phosphoglycerate kinase. Other useful promoters for yeast host cells are known in the art (See e.g., Romanos et al., Yeast, 1992, 8:423-488). Exemplary promoters for use in insect cells include, but are not limited to, polyhedrin, p10, ELT, OpIE2, and hr5/ie1 promoters. Exemplary promoters for use in mammalian cells include, but are not limited to, those from cytomegalovirus (CMV), chicken β-actin promoter fused with the CMV enhancer, Simian vacuolating virus 40 (SV40), from Homo sapiens phosphoglycerate kinase, beta actin, elongation factor-la or glyceraldehyde-3-phosphate dehydrogenase, or from Gallus β-actin.

[0315] In some embodiments, the control sequence is also a suitable transcription terminator sequence (i.e., a sequence recognized by a host cell to terminate transcription). In some embodiments, the terminator sequence is operably linked to the 3′ terminus of the nucleic acid sequence encoding the leucine decarboxylase polypeptide. Any suitable terminator which is functional in the host cell of choice finds use in the present invention. For bacterial expression, the transcription terminators can be a Rho-dependent terminators that rely on a Rho transcription factor, or a Rho-independent, or intrinsic terminators, which do not require a transcription factor. Exemplary bacterial transcription terminators are described in Peters et al., J Mol Biol., 2011, 412 (5): 793-813. Exemplary transcription terminators for filamentous fungal host cells can be obtained from the genes for Aspergillus oryzae TAKA amylase, Aspergillus niger glucoamylase, Aspergillus nidulans anthranilate synthase, Aspergillus niger alpha-glucosidase, and Fusarium oxysporum trypsin-like protease. Exemplary terminators for yeast host cells can be obtained from the genes for Saccharomyces cerevisiae enolase, Saccharomyces cerevisiae cytochrome C (CYC1), and Saccharomyces cerevisiae glyceraldehyde-3-phosphate dehydrogenase. Other useful terminators for yeast host cells are known in the art (See e.g., Romanos et al., supra). Exemplary terminators for mammalian cells include, but are not limited to those from cytomegalovirus (CMV), Simian virus 40 (SV40), from Homo sapiens growth hormone hGH, from bovine growth hormone BGH, and from human or rabbit beta globulin.

[0316] In some embodiments, the control sequence is also a suitable leader sequence (i.e., a non-translated region of an mRNA that is important for translation by the host cell). In some embodiments, the leader sequence is operably linked to the 5′ terminus of the nucleic acid sequence encoding the RNA ligase polypeptide. Any suitable leader sequence that is functional in the host cell of choice find use in the present invention. Exemplary leaders for filamentous fungal host cells are obtained from the genes for Aspergillus oryzae TAKA amylase, and Aspergillus nidulans triose phosphate isomerase. Suitable leaders for yeast host cells are obtained from the genes for Saccharomyces cerevisiae enolase (ENO-1), Saccharomyces cerevisiae 3-phosphoglycerate kinase, Saccharomyces cerevisiae alpha-factor, and Saccharomyces cerevisiae alcohol dehydrogenase/glyceraldehyde-3-phosphate dehydrogenase (ADH2/GAP). Suitable leaders for mammalian host cells include but are not limited to the 5′-UTR element present in orthopoxvirus mRNA.

[0317] In some embodiments, the control sequence comprises a 3′ untranslated nucleic acid region and polyadenylation tail nucleic acid sequence, sequences operably linked to the 3′ terminus of the protein coding nucleic acid sequence which mediate binding to proteins involved in mRNA trafficking and translation and mRNA half-life. Any polyadenylation sequence and 3′ UTR which is functional in the host cell of choice may be used in the present invention. Exemplary polyadenylation sequences for filamentous fungal host cells include, but are not limited to those from the genes for Aspergillus oryzae TAKA amylase, Aspergillus niger glucoamylase, Aspergillus nidulans anthranilate synthase, Fusarium oxysporum trypsin-like protease, and Aspergillus niger alpha-glucosidase. Useful polyadenylation sequences for yeast host cells are also known in the art (See e.g., Guo and Sherman, Mol. Cell. Biol., 1995, 15:5983-5990). Useful polyadenylation and 3′ UTR sequences for mammalian host cells include, but are not limited to, the 3′-UTRs of α- and β-globin mRNAs that harbor several sequence elements that increase the stability and translation of mRNA.

[0318] In some embodiments, the control sequence is also a signal peptide (i.e., a coding region that codes for an amino acid sequence linked to the amino terminus of a polypeptide and directs the encoded polypeptide into the cell's secretory pathway). In some embodiments, the 5′ end of the coding sequence of the nucleic acid sequence inherently contains a signal peptide coding region naturally linked in translation reading frame with the segment of the coding region that encodes the secreted polypeptide. Alternatively, in some embodiments, the 5′ end of the coding sequence contains a signal peptide coding region that is foreign to the coding sequence. Any suitable signal peptide coding region which directs the expressed polypeptide into the secretory pathway of a host cell of choice finds use for expression of the engineered polypeptide(s). Effective signal peptide coding regions for bacterial host cells are the signal peptide coding regions include, but are not limited to those obtained from the genes for Bacillus NCIB 11837 maltogenic amylase, Bacillus stearothermophilus alpha-amylase, Bacillus licheniformis subtilisin, Bacillus licheniformis beta-lactamase, Bacillus stearothermophilus neutral proteases (nprT, nprS, nprM), and Bacillus subtilis prsA. Further signal peptides are known in the art (See e.g., Simonen and Palva, Microbiol. Rev., 1993, 57:109-137). In some embodiments, effective signal peptide coding regions for filamentous fungal host cells include, but are not limited to the signal peptide coding regions obtained from the genes for Aspergillus oryzae TAKA amylase, Aspergillus niger neutral amylase, Aspergillus niger glucoamylase, Rhizomucor miehei aspartic proteinase, Humicola insolens cellulase, and Humicola lanuginosa lipase. Useful signal peptides for yeast host cells include, but are not limited to those from the genes for Saccharomyces cerevisiae alpha-factor and Saccharomyces cerevisiae invertase. Useful signal peptides for mammalian host cells include but are not limited to, those from the genes for immunoglobulin gamma (IgG) and the signal peptide in a human secreted protein, such as human beta-galactosidase polypeptide.

[0319] In some embodiments, the control sequence is a regulatory sequence that facilitates the regulation of the expression of the recombinant polynucleotide and/or encoded polypeptide. Examples of regulatory systems are those that cause the expression of the gene to be turned on or off in response to a chemical or physical stimulus, including the presence of a regulatory compound. In prokaryotic host cells, suitable regulatory sequences include, but are not limited to the lac, tac, and trp operator systems. In yeast host cells, suitable regulatory systems include, but are not limited to the ADH2 system or GAL1 system. In filamentous fungi, suitable regulatory sequences include, but are not limited to the TAKA alpha-amylase promoter, Aspergillus niger glucoamylase promoter, and Aspergillus oryzae glucoamylase promoter. Exemplary inducible promoters regulated by exogenous agents include the zinc-inducible sheep metallothionine (MT) promoter, dexamethasone (Dex)-inducible promoter, mouse mammary tumor virus (MMTV) promoter; ecdysone insect promoter, tetracycline-inducible promoter system, RU486-inducible promoter system, and the rapamycin-inducible promoter system.

[0320] In another aspect, the present disclosure provides an expression vector comprising a recombinant polynucleotide encoding an RNA ligase polypeptide, where the recombinant polynucleotide is operably or operatively linked to a control sequence, such as a promoter and a terminator, a replication origin, etc., depending on the type of hosts into which they are to be introduced. The recombinant expression vector may be any suitable vector (e.g., a plasmid or virus), that can be conveniently subjected to recombinant DNA procedures and bring about the expression of the RNA ligase polynucleotide sequence. The choice of the vector typically depends on the compatibility of the vector with the host cell into which the vector is to be introduced. The vectors may be linear or closed circular plasmids.

[0321] In some embodiments, the expression vector is an autonomously replicating vector (i.e., a vector that exists as an extra-chromosomal entity, the replication of which is independent of chromosomal replication, such as a plasmid, an extra-chromosomal element, a minichromosome, or an artificial chromosome). The vector may contain any means for assuring self-replication. In some alternative embodiments, the vector may be one which, when introduced into the host cell, is integrated into the genome and replicated together with the chromosome(s) into which it has been integrated. Furthermore, a single vector or plasmid or two or more vectors or plasmids which together contain the total DNA to be introduced into the genome of the host cell, or a transposon may be used.

[0322] In some embodiment, recombinant polynucleotides may be provided on a non-replicating expression vector or plasmid. In some embodiments, the non-replicating expression vector or plasmid can be based on viral vectors defective in replication (see, e.g., Travieso et al., npj Vaccines, 2022, Vol. 7, Article 75).

[0323] In some embodiments, the expression vector contains one or more selectable markers, which permit easy selection of transformed cells. A “selectable marker” is a gene, the product of which provides for biocide or viral resistance, resistance to heavy metals, prototrophy to auxotrophs, and the like. Examples of bacterial selectable markers include, but are not limited to the dal genes from Bacillus subtilis or Bacillus licheniformis, or markers, which confer antibiotic resistance such as ampicillin, kanamycin, chloramphenicol or tetracycline resistance. Suitable markers for yeast host cells include, but are not limited to ADE2, HIS3, LEU2, LYS2, MET3, TRP1, and URA3. Selectable markers for use in filamentous fungal host cells include, but are not limited to, amdS (acetamidase; e.g., from A. nidulans or A. orzyae), argB (ornithine carbamoyltransferases), bar (phosphinothricin acetyltransferase; e.g., from S. hygroscopicus), hph (hygromycin phosphotransferase), niaD (nitrate reductase), pyrG (orotidine-5′-phosphate decarboxylase; e.g., from A. nidulans or A. orzyae), sC (sulfate adenyltransferase), and trpC (anthranilate synthase), as well as equivalents thereof.

[0324] In another aspect, the present disclosure provides a host cell comprising at least one recombinant polynucleotide encoding an RNA ligase polypeptide of the present disclosure, the recombinant polynucleotide(s) being operatively linked to one or more control sequences for expression of the RNA ligase polypeptide. In some embodiments, the host cells suitable for use in expressing the polypeptides encoded by the expression vectors is a prokaryotic cell or eukaryotic cell known in the art and include but are not limited to, bacterial cells, such as E. coli, Vibrio fluvialis, Streptomyces and Salmonella typhimurium cells; fungal cells, such as yeast cells (e.g., Saccharomyces cerevisiae or Pichia pastoris (ATCC Accession No. 201178)); insect cells such as Drosophila S2 and Spodoptera Sf9 cells; animal (e.g., mammalian) cells such as CHO, COS, BHK, 293, and Bowes melanoma cells; and plant cells. Exemplary host cells also include various Escherichia coli strains (e.g., W3110 (ΔfhuA) and BL21).

[0325] In another aspect, the present disclosure provides a method of producing the RNA ligase polypeptides, where the method comprises culturing a host cell comprising an expression vector capable of expressing or producing the RNA ligase polypeptide under suitable culture conditions such that the RNA ligase polypeptide is expressed or produced. In some embodiments, the method comprises isolating the RNA ligase from the culture medium and/or host cell, as described herein. In some further embodiments, the method further comprises purifying the expressed RNA ligase polypeptide.

[0326] In some embodiments, the RNA ligase polypeptide expressed in a host cell is recovered from the cells and/or the culture medium using any one or more of the known techniques for protein purification, including, among others, lysozyme or detergent treatment, sonication, filtration, salting-out, ultra-centrifugation, and chromatography, such as described herein.

[0327] Chromatographic techniques for isolation/purification of the RNA ligase polypeptides include, among others, reverse phase chromatography, high-performance liquid chromatography, ion-exchange chromatography, hydrophobic-interaction chromatography, size-exclusion chromatography, gel electrophoresis, and affinity chromatography. Conditions for purifying the RNA ligase depends, in part, on factors such as net charge, hydrophobicity, hydrophilicity, molecular weight, molecular shape, etc., and will be apparent to those having skill in the art. In some embodiments, affinity techniques may be used to isolate the RNA ligase. For affinity chromatography purification, an antibody that specifically binds RNA ligase polypeptide may be used. In some embodiments, an affinity tag, e.g., His-tag, can be introduced into the RNA ligase polypeptide for purposes of isolation/purification.

[0328] Appropriate culture media and growth conditions for the above-described host cells are well known in the art. Polynucleotides for expression of the RNA ligases may be introduced into cells by various methods known in the art. Techniques include, among others, electroporation, biolistic particle bombardment, liposome mediated transfection, calcium chloride transfection, and protoplast fusion.

[0329] In some embodiments, the polynucleotides encoding the RNA ligase polypeptide can be prepared by standard solid-phase methods, according to known synthetic methods. In some embodiments, polynucleotide fragments can be individually synthesized, then joined (e.g., by enzymatic or chemical litigation methods, or polymerase mediated methods) to form any desired continuous sequence (see, e.g., Hughes et al., Cold Spring Harb Perspect Biol. 2017 January; 9 (1): a023812). For example, polynucleotides and oligonucleotides disclosed herein can be prepared by chemical synthesis using the classical phosphoramidite method (See e.g., Beaucage et al., Tetra. Lett., 1981, 22:1859-69; and Matthes et al., EMBO J., 1984, 3:801-05), as it is typically practiced in automated synthetic methods.

[0330] In some embodiments, a method for preparing the RNA ligase can comprise: (a) synthesizing a polynucleotide encoding a polypeptide comprising an amino acid sequence selected from the amino acid sequence of an RNA ligase, such as described in the Tables of the Examples, and (b) expressing the engineered RNA ligase encoded by the polynucleotide. In some embodiments of the method, the amino acid sequence encoded by the polynucleotide can optionally have one or several (e.g., up to 3, 4, 5, or up to 10) amino acid residue deletions, insertions and/or substitutions. In some embodiments, the amino acid sequence has optionally 1-2, 1-3, 1-4, 1-5, 1-6, 1-7, 1-8, 1-9, 1-10, 1-15, 1-20, 1-21, 1-22, 1-23, 1-24, 1-25, 1-30, 1-35, 1-40, 1-45, or 1-50 amino acid residue deletions, insertions and/or substitutions. In some embodiments, the amino acid sequence has optionally 1, 2, 3, 4, 5, 6, 7, 8, 9, 10, 11, 12, 13, 14, 15, 16, 17, 18, 19, 20, 21, 22, 23, 24, 25, 30, 30, 35, 40, 45, or 50 amino acid residue deletions, insertions and/or substitutions. In some embodiments, the amino acid sequence has optionally 1, 2, 3, 4, 5, 6, 7, 8, 9, 10, 11, 12, 13, 14, 15, 16, 18, 20, 21, 22, 23, 24, or 25 amino acid residue deletions, insertions and/or substitutions. In some embodiments, the substitutions can be conservative or non-conservative substitutions. The expressed polypeptide can be assessed for the desired property, e.g., RNA ligase activity on one or more oligonucleotide substrates, such as described in the Examples.

### Composition of RNA Ligases

[0331] In a further aspect, the present disclosure provides compositions of the engineered RNA ligases disclosed herein. In some embodiments, the composition comprises at least one engineered RNA ligase polypeptide described herein, e.g., an engineered RNA ligase provided in Tables 3, 4, 5, 6, 7.1, 7.2, 8, 9, 10, 11.3, 11.4, and 12, or in the Sequence Listing. In some embodiments, a composition comprises an RNA ligase comprising an amino acid sequence comprising residues 12 to 343 of SEQ ID NO: 2, an amino acid sequence comprising SEQ ID NO: 2, or an amino acid sequence comprising residues 12 to 343 of an even numbered SEQ ID NO. of SEQ ID NOs: 4-220, 224-252, and 270-958, or an amino acid sequence comprising an even numbered SEQ ID NO. of SEQ ID NOs: 4-220, 224-252, and 270-958. In some embodiments, the composition comprises an engineered RNA ligase comprising an amino acid sequence comprising residues 12 to 343 of SEQ ID NO: 4, 106, 218, 286, 396, 436, 520, 552, or 582, or comprising SEQ ID NO: 4, 106, 218, 286, 396, 436, 520, 552, or 582. In some embodiments, the engineered RNA ligase polypeptide in the compositions is isolated or purified. In some embodiments, the RNA ligase is combined with other components and compounds to provide compositions and formulations comprising the engineered RNA ligase polypeptide as appropriate for different applications and uses.

[0332] In some embodiments, the composition further comprises one or more of a buffer, a nucleotide substrate (e.g., ATP or dATP), and/or at least one or more polynucleotide ligase substrates. In some embodiments, the polynucleotides substrates are single stranded or double stranded, or comprises single stranded and double stranded polynucleotide substrates. In some embodiments, the polynucleotide substrate comprises at least two oligonucleotide fragments, where an oligonucleotide fragment comprises double stranded oligonucleotide fragment and the at least two double stranded oligonucleotide fragments can base pair to serve as substrates for the RNA ligase. In some embodiments, the composition further comprises at least 2, 3, 4, 5, 6 or more double stranded oligonucleotide fragments, each of which can serve as substrates for the RNA ligase. In some embodiments, the polynucleotide substrate is a modified polynucleotide. In some embodiments, the modified polynucleotide comprises a modification on the sugar residue, e.g., 2′-position, a modified phosphate group, e.g., phosphorothioate; or modified nucleobase, or any combination of modifications, as further described herein.

[0333] In some embodiments, the RNA ligase substrate concentration in the composition is at about 0.01-1 mM, 0.05-0.9 mM, 0.1-0.8 mM, 0.2-0.7 mM, or 0.3 mM-0.6 mM. In some embodiments, the RNA ligase substrate is at about 0.01 mM, 0.05 mM, 0.1 mM, 0.2 mM, 0.3 mM, 0.4 mM, 0.5 mM, 0.6 mM, 0.7 mM, 0.8 mM, 0.9 mM or 1 mM. In some embodiments, the RNA ligase substrate concentration is at about 1-10 mM, 2-8 mM, or 4-6 mM. In some embodiments, the engineered RNA ligase exhibits increased product yield at about 1 mM, 2 mM, 3 mM, 4 mM, 5 mM, 6 mM, 7 mM, 8 mM, 9 mM, or 10 mM.

[0334] In some embodiments, the composition further comprises a nucleotide cofactor or substrate used by the RNA ligase to catalyze the joining reaction. In some embodiments, the nucleotide cofactor or substrate is ATP and/or dATP. Preferably, the nucleotide cofactor or substrate is ATP. In some embodiments, the nucleotide cofactor or substrate (e.g., ATP) is present at a concentration of about 0.05-25 mM, 1-20 mM, 2-18 mM, or 5-15 mM. In some embodiments, the nucleotide cofactor or substrate is present at a concentration of about 0.5 mM, 1 mM, 2 mM, 3 mM 4 mM, 5 mM, 6 mM, 7 mM, 8 mM, 9 mM, 10 mM, 12 mM, 15 mM, 20 mM, or 25 mM.

[0335] In some embodiments, the composition further comprises a buffer, In some embodiments, the buffer comprises, among others, borate, phosphate, 2-(N-morpholino) ethanesulfonic acid (MES), 3-(N-morpholino) propanesulfonic acid (MOPS), acetate, triethanolamine (TEoA), and 2-amino-2-hydroxymethyl-propane-1,3-diol (Tris), and the like. In some embodiments, the buffer concentration is from 1 to 200 mM, 5 to 200 mM, 1 to 150 mM, 5 to 150 mM, 1 to 100 mM, 5 to 100 mM, 1 to 50 mM, 5 to 50 mM, 1 to 20 mM, 5 to 20 mM, 1 to 10 mM, or 5 to 10 mM.

[0336] In some embodiments, the composition further comprises an additive or ligation enhancing agent, including, among others, one or more of DMSO, betaine, polyethylene glycol (e.g., PEG 6000, PEG 8000, etc.), bovine serum albumin, Ficoll, and dextran (e.g., Dextran 6000). In some embodiments, the composition comprises 1% to 40% v/v of DMSO. In some embodiments, the composition comprises 0.1 M to 3 M betaine. In some embodiments, the composition comprises 0.5% to 20% w/v of PEG (e.g., PEG6000 or PEG8000).

[0337] In some embodiments, the composition further comprises an RNase inhibitor, including, among others, porcine RNase inhibitor, human placental RNase inhibitor, human liver RNase inhibitor, mouse RNase inhibitor, rat RNase inhibitor, and recombinantly expressed RNase inhibitors thereof.

[0338] In some embodiments, an engineered RNA ligase described herein is provided in solution or is immobilized on a substrate. In some embodiments, the substrate is a solid substrate or a membrane or particles. The enzyme can be entrapped in matrixes or membranes. In some embodiments, matrices include polymeric materials such as calcium-alginate, agar, k-carrageenin, polyacrylamide, and collagen, or solid matrices, such as activated carbon, porous ceramic, and diatomaceous earth. In some embodiments, the matrix is a particle, a membrane, or a fiber. Types of membranes include, among others, nylon, cellulose, polysulfone, or polyacrylate.

[0339] In some embodiments, the enzyme is immobilized on the surface of a support material. In some embodiments, the enzyme is adsorbed on the support material. In some embodiments, the enzyme is immobilized on the support material by covalent attachment. Support materials include, among others, inorganic materials, such as alumina, silica, porous glass, ceramics, diatomaceous earth, clay, and bentonite, or organic materials, such as cellulose (CMC, DEAE-cellulose), starch, activated carbon, polyacrylamide, polystyrene, and ion-exchange resins, such as Amberlite, Sephadex, and Dowex.

### Uses and Methods

[0340] In another aspect, the present disclosure provides uses of the engineered RNA ligases for polynucleotide synthesis, RNA repair, or other molecular biological uses.

[0341] In some embodiments, the engineered RNA ligase is used for ligating polynucleotides and oligonucleotides. In some embodiments, the engineered RNA ligase is used for synthesizing polynucleotides from shorter oligonucleotides. In some embodiments, a method of ligating at least a first polynucleotide strand and a second polynucleotide strand comprises contacting a first polynucleotide strand and a second polynucleotide strand with an engineered RNA ligase described herein in presence of a nucleotide substrate under conditions suitable for ligation of the first polynucleotide strand to the second polynucleotide strand, wherein the first polynucleotide strand comprises a ligatable 5′-end and the second polynucleotide strand comprises a 3′-end ligatable to the 5′-end of the first polynucleotide strand.

[0342] In some embodiments, the second polynucleotide strand comprising a ligatable 3′-end has at least 2, 3, 4, 5 or 6 ribonucleotides at the 3′ terminal end. In some embodiments of the method, the 3′-end of the second polynucleotide strand is a 3′-OH. In some embodiments of the method, the 5′-end of the first polynucleotide strand is a 5′-phosphate. In some embodiments of the method, the internucleoside linkage contained in the first polynucleotide strand and/or second polynucleotide strand comprises a phosphate linkage.

[0343] In some embodiments, the first polynucleotide strand has at least a 5′-terminal nucleotide with a 2′-modified sugar moiety. In some embodiments, at least 2, 3, 4, or more of nucleotides at the 5′-terminal region of the first polynucleotide strand has 2′-modified sugar moiety. In some embodiments, the first polynucleotide strand has at least a 5′-terminal nucleotide with a non-natural internucleoside linkage to the adjacent 3′-nucleotide. In some embodiments, at least 2, 3, 4 or more nucleotides at the 5′-terminal region of the first polynucleotide strand has a non-natural internucleoside linkage. In some embodiments, the non-natural linkage is a phosphorothioate internucleoside linkage.

[0344] In some embodiments, the second polynucleotide strand has at least the 3′-terminal nucleotide with a 2′-modified sugar moiety. In some embodiments, at least 2, 3, 4, or more of nucleotides at the 3′-terminal region of the second polynucleotide strand have a 2′-modified sugar moiety. In some embodiments, the second polynucleotide strand has at least a 3′-terminal nucleotide with a non-natural internucleoside linkage to the adjacent 5′-nucleotide. In some embodiments, at least 2, 3, 4 or more nucleotides at the 3′-terminal region of the second polynucleotide strand has a non-natural internucleoside linkage. In some embodiments, the non-natural linkage is a phosphorothioate internucleoside linkage.

[0345] In some embodiments, the first polynucleotide strand has at least a 5′-terminal nucleotide with a 2′-modified sugar moiety, and the second polynucleotide strand has at least a 3′-terminal nucleotide with a 2′-modified sugar moiety. In some embodiments, at least 2, 3, 4, or more of nucleotides at the 5′-terminal region of the first polynucleotide strand have 2′-modified sugar moieties, and at least 2, 3, 4, or more of nucleotides at the 3′-terminal region of the second polynucleotide strand have 2′-modified sugar moieties. As further discussed below, in some embodiments, the 2′-modified sugar moiety is a 2′-O-methyl, 2′-O-ethyl, or 2′-fluoro. In some embodiments, the first polynucleotide strand has at least a 5′-terminal nucleotide with a non-natural internucleoside linkage to the adjacent 3′-nucleotide, and the second polynucleotide strand has at least a 3′-terminal nucleotide with a non-natural internucleoside linkage to the adjacent 5′-nucleotide. In some embodiments, at least 2, 3, 4 or more nucleotides at the 5′-terminal region of the first polynucleotide strand and at least 2, 3, 4 or more nucleotides at the 3′-terminal region of the second polynucleotide strand have a non-natural internucleoside linkage. In some embodiments, the non-natural internucleoside linkage is a phosphorothioate internucleoside linkage.

[0346] In some embodiments, the method further comprising a third polynucleotide strand, wherein the first polynucleotide strand and second polynucleotide strand hybridize adjacent to one another on the third polynucleotide strand to position the 5′-end of the first polynucleotide strand adjacent to the 3′-end of the second polynucleotide strand. In some embodiments of the method, the third polynucleotide strand is continuous with the first polynucleotide strand or second polynucleotide strand. In some embodiments of the method, the third polynucleotide strand is continuous with the first polynucleotide strand and second polynucleotide strand to form a single continuous polynucleotide ligase substrate. In some embodiments, the third polynucleotide strand is RNA, DNA, or a mixture of RNA and DNA.

[0347] In some embodiments of the method, the third polynucleotide comprises a splint or bridging polynucleotide, wherein the 5′-terminal sequence of the first polynucleotide strand and the 3′-terminal sequence of the second polynucleotide strand hybridize adjacent to one another on the splint or bridging polynucleotide to position the 5′-end of the first polynucleotide strand adjacent to the 3′-end of the second polynucleotide strand. In some embodiments, the splint or bridging polynucleotide is RNA, DNA, or a mixture of RNA and DNA.

[0348] In some embodiments, the second polynucleotide strand comprising a ligatable 3′-end has at least 4, 5 or 6 ribonucleotides at the 3′ terminal end. In some embodiments of the method, the 3′-end of the second polynucleotide strand is a 3′-OH. In some embodiments of the method, the 5′-end of the first polynucleotide strand is a 5′-phosphate. In some embodiments of the method, the internucleoside linkage contained in the first polynucleotide strand and/or second polynucleotide strand comprises a phosphate linkage.

[0349] In some embodiments of the method, the third polynucleotide strand comprises a splint or bridging polynucleotide, wherein the 5′-terminal sequence of the first polynucleotide strand and the 3′-terminal sequence of the second polynucleotide strand hybridize adjacent to one another on the splint or bridging polynucleotide to position the 5′-end of the first polynucleotide strand adjacent to the 3′-end of the second polynucleotide strand.

[0350] In some embodiments, one or more additional polynucleotide strands can be hybridized to the third polynucleotide strand, where an additional polynucleotide strand hybridizes adjacent to the 3′-end of the first polynucleotide strand, or adjacent to the 5′-end of the second polynucleotide strand, or two additional polynucleotide strands hybridize adjacent to the 3′-end of the first polynucleotide strand and adjacent to the 5′-end of the second polynucleotide strand to form nick(s) that can be ligated with an engineered RNA ligase. Additional polynucleotide strands can be hybridized in like manner and ligated to prepare longer polynucleotide strands.

[0351] In some embodiments, the first polynucleotide strand and/or second polynucleotide strand can have a single strand region (e.g., overhang or unpaired regions) when hybridized to the third polynucleotide strand, and a fourth polynucleotide strand added that hybridizes to the single stranded region of the first polynucleotide strand or second polynucleotide stranded, where the fourth polynucleotide strand hybridizes adjacent to the 5′-end or 3′-end of the third polynucleotide strand to form a nick, which can be then ligated with an engineered RNA ligase. In some embodiments, the fourth polynucleotide strand can have a single stranded region (e.g., overhang or unpaired regions) when hybridized to the first polynucleotide strand or second polynucleotide strand on the third polynucleotide strand, and a fifth polynucleotide strand added that hybridizes to the single stranded region of the fourth polynucleotide strand, where the fifth polynucleotide strand hybridizes adjacent to the 3′-end of the first polynucleotide strand or the 5′-end of the second polynucleotide strand to form a nick, which can be ligated with an engineered RNA ligase. Such successive additions of polynucleotide strands can be used to generate longer polynucleotide products (see, e.g., Paul et al., ACS Chem. Biol. 2023, 18, 2183-2187, incorporated by reference herein).

[0352] In some embodiments, the first polynucleotide strand is hybridized to the third polynucleotide strand to form a first double stranded fragment, and the second polynucleotide strand is hybridized to a fourth polynucleotide strand to form a second double stranded fragment, where the first and second double stranded fragments can base pair to form a substrate for the engineered RNA ligase. In some embodiments, the first double stranded fragment and the second double stranded fragment have complementary overhangs or complementary single stranded ends, also referred to as cohesive or sticky ends, that can base pair and form double stranded nick(s) between the first and second double stranded fragments that serve as a substrate for the engineered RNA ligase.

[0353] In some embodiments, the complementary ends (sticky or cohesive ends) are of sufficient length for the double stranded fragments to base pair and form suitable substrates for the engineered RNA ligase. In some embodiments, the complementary single stranded end comprises at least 1-50, 2-40, 3-35, 4-30, 5-25, 6-20, or 8-15 or more nucleotides in length. In some embodiments, the complementary single stranded end is from 1-10, 2-8, or 4-6 nucleotides in length. In some embodiments, the complementary single stranded end is 1, 2, 3, 4, 5, 6, 8, 10, 12, 14, 16, 18, 20, or more nucleotides in length.

[0354] In some embodiments, the double stranded region or complementary portion of each of the double stranded fragment is from 4-50, 6-45, 8-40, 10-35, 12-30, or 14-25 nucleotides in length. In some embodiments, the double stranded region is at least 4, 5, 6, 7, 8, 9, 10, 12, 14, 16, 18, 20, 22, 24, 26, 28, 30, 35, 40, 45, or 50 nucleotides in length.

[0355] In some embodiments of the method, the ligase substrates comprise at least 2, 3, 4, 5, or 6 or more double stranded fragments, where each double stranded fragment has a complementary end that can base pair with at least one other double stranded fragment with a complementary end to form substrates for the RNA ligase. In some embodiments, the double stranded fragments have complementary or cohesive ends, e.g., at the 5′ and 3′ ends, such that the double stranded fragments can be ligated to form concatemers. In some embodiments, where the number of double stranded fragments is 3, at least one of the double stranded fragments has complementary ends at the 5′ and 3′ ends of the fragment, where double stranded fragment base pairs with two other different double stranded fragments to form a substrate that can be ligated to a product containing the three double stranded fragments. It is to be understood that where 3 or more double stranded fragments are ligated, the complementary ends of the double stranded fragments can be designed for ligation of all of the different double stranded fragments.

[0356] In some embodiments, the polynucleotide substrate comprises one or more modified nucleotides. In some embodiments, the modification comprises a modified sugar residue, a modified nucleobase, and/or modified phosphate group. In some embodiments, the modified sugar residue is modified at the 2-position of the sugar moiety. In some embodiments, the modified 2-position is a 2′-halo or 2′-O-alkyl, preferably a lower C₁-C₄alkyl, e.g., methyl or ethyl. In some embodiments, the modified nucleotide is a modified phosphate group, for example a phosphorothioate group. In some embodiments, the modified phosphate group is at the 5′-end of a polynucleotide substrate. In some embodiments, the modified phosphate group is at an internucleoside linkage of the polynucleotide substrate. In some embodiments, the modified nucleotide has a modified nucleobase. In some embodiments, the polynucleotide substrate includes an inverted nucleotide or an abasic nucleotide (e.g., 5′-5′ linkage or a 3′-3′ linkage), including 3′-3′ inverted dA, dT, dG, dC, dU, or abasic deoxyribonucleotide; and/or 5′-5′ inverted dA, dT, dG, dC, dU, or abasic deoxyribonucleotide.

[0357] In some embodiments of the method, the first polynucleotide strand and/or second polynucleotide strand comprise one or more modified nucleotides or nucleotide analogs, wherein the modified nucleotide or nucleotide analog comprises a nucleobase analog, modified nucleoside sugar residue, modified internucleoside linkage, modified 5′-end phosphate group, and/or modified 3′-end hydroxyl group.

[0358] In some embodiments, the polynucleotide ligase substrate comprises a modified 5′-end phosphate group, wherein the modified phosphate group is a phosphate analog. In some embodiments of the method, the first polynucleotide comprises a 5′-phosphate analog. In some embodiments, the 5′-phosphate analog is a phosphorothioate, phosphoramidate, monomethylphosphate, methylphosphonate, vinylphosphonate, or phosphonocarboxylate.

[0359] In some embodiments of the method, the polynucleotide ligase substrate comprises one or more modified nucleoside sugar residues. In some embodiments of the method, the first polynucleotide and/or second polynucleotide comprises one or more modified nucleoside sugar residues. In some embodiments, the modified nucleoside sugar residue is a 2′-O-alkyl, a 2′-halo, a β-D-ribo LNA, or a α-L-ribo-LNA (locked nucleic acids). In some embodiments, the modified nucleoside sugar residue is, among others, a 2′-O-methyl, 2′-O-ethyl, or 2′-O-propyl group. In some embodiments, the modified nucleoside sugar residue is 2′-fluoro, 2′-bromo, or 2′-chloro, preferably 2′-fluoro. In some embodiments, the sugar residue is modified with a ligand, such as a cell targeting ligand, or a cell penetrating moiety, for example, GalNAc and lipid moieties. In some embodiments, the sugar residue is modified with a linker moiety.

[0360] In some embodiments of the method, the polynucleotide ligase substrate comprises one or more modified nucleotide residues having a modified nucleobase or nucleobase analog. In some embodiments of the method, the first polynucleotide and/or second polynucleotide comprises one or more modified nucleotide residues having a modified nucleobase or nucleobase analog. In some embodiments, the nucleobase analog is, among others, xanthine, hypoxanthine, inosine, 6-methyladenine, 7-methylguanine, 2,6-diaminopurine, 5-methylcytosine, 5-hydroxycytosine, 5-bromocytosine, 5-iodocytosine, 2-thiothymine, 5-fluorouracil, 5-bromouracil, 8-bromoguanine, 8-aminoguanine, or 8-aza-7-deazaguanine. In some embodiments, the nucleobase is modified with a ligand, such as a chemical label, a cell targeting ligand, or a cell penetrating moiety. In some embodiments, the nucleobase is modified with linker moiety, for example for conjugating a ligand.

[0361] In some embodiments of the method, the polynucleotide ligase substrate comprises one or more modified or non-standard internucleoside linkages, i.e., internucleoside linkages other than phosphate linkages. In some embodiments, the first polynucleotide and/or second polynucleotide comprises one or more modified or non-standard internucleoside linkages. In some embodiments, the internucleoside linkage is a phosphorothioate, phosphoacetate, phosphoramidate, methylphosphonate, or phosphonocarboxylate. In some embodiments, at least 1%, 2%, 5%, 10%, 20%, 30%, 40%, 50%, 60%, 70%, 80%, 90%, or more of the internucleoside linkages are non-standard internucleoside linkages. In some embodiments, the non-standard internucleoside linkages are present 1, 2, 3, 4 or 5 nucleotides of the 5′ and/or 3′-terminus of the polynucleotide substrates. In some embodiments, the non-standard internucleoside linkage, such as phosphorothioate, is diastereomeric, e.g., S or P configuration.

[0362] In some embodiments of the method, the polynucleotide ligase substrate comprises modified 3′-hydroxyl group. In some embodiments, 3′-end of a polynucleotide ligase substrate is attached to a matrix or surface, such as a solid matrix. In such instances, the polynucleotide ligase substrate attached to a matrix has a ligatable 5′-end. In some embodiments, the 3′-end of a ligase substrate is modified with an amine, halo, phosphate, phosphate analog, —O-alkyl, lipid moiety, or a detectable label. In some embodiments, the 5′-end of the polynucleotide substrate is modified with a cell-targeting, cell penetrating, or linker moiety. In some embodiments, the cell targeting moiety is a GalNAc moiety.

[0363] In some embodiments, the polynucleotide ligase substrate comprises C-4′ modifications, including among others, 4′-thio-C2′ modifications, 4′/5′ aminoalkyl/C2′ modifications, C4′-Guanidino-C2′-modifications, and C4′-O-Me/C2′-modifications (see, e.g., Gangopadhyay et al., RNA Biology, 2022, 19:1, 452-467).

[0364] In some embodiments, the engineered RNA ligase is used in a method to synthesize RNA or DNA/RNA polynucleotides by ligation of shorter RNA or DNA/RNA oligonucleotides. In some embodiments, the engineered RNA ligase is used to ligate the 3′ OH of RNA to the 5′ phosphate of DNA or RNA. In some embodiments, the engineered RNA ligase is used to ligate the 3′ OH of RNA to the 5′ phosphate of DNA in a double-stranded-format NGS RNA library construction. In some embodiments, the engineered RNA ligase is used in a method of preparing RNA rings. In some embodiments, the engineered RNA ligase is used to repair nicks in dsRNA or dsRNA/DNA. In some embodiments, the engineered RNA ligase is used to synthesize modified oligonucleotides, such as shRNA and antisense oligonucleotides.

[0365] In some embodiments, the amount of engineered RNA ligase used is sufficient to ligate the oligonucleotide substrates or ligate a nick formed by the oligonucleotide substrates to the desired level. The amount of enzyme used can also be adjusted based the activity of the ligase, and type of substrate being ligated. In some embodiments, the amount of enzyme used is about 0.1 mg/mL to about 5 mg/mL. about 0.5 mg/mL to about 4 mg/mL, 1 mg/mL to about 3 mg/mL, or about 1.5 to about 2.5 mg/mL. In some embodiments, the engineered RNA ligase is provided at concentrations from about 0.01 g/L to about 50 g/L; about 0.01 to about 0.1 g/L; about 0.05 g/L to about 50 g/L; about 0.1 g/L to about 40 g/L; about 1 g/L to about 40 g/L; about 2 g/L to about 40 g/L; about 5 g/L to about 40 g/L; about 5 g/L to about 30 g/L; about 0.1 g/L to about 10 g/L; about 0.5 g/L to about 10 g/L; about 1 g/L to about 10 g/L; about 0.1 g/L to about 5 g/L; about 0.5 g/L to about 5 g/L; or about 0.1 g/L to about 2 g/L.

[0366] In some embodiments, the method includes a nucleotide substrate used by the RNA ligase to catalyze the joining reaction. In some embodiments, the nucleotide substrate is ATP and/or dATP. Preferably, the nucleotide substrate is ATP. In some embodiments, the reaction conditions for the ligation include additional components, such as Mg⁺², buffer and/or salts.

[0367] In some embodiments, the nucleotide cofactor or substrate (e.g., ATP) is present at a concentration of about 0.05-25 mM, 1-20 mM, 2-18 mM, or 5-15 mM. In some embodiments, the nucleotide cofactor or substrate is present at a concentration of about 0.5 mM, 1 mM, 2 mM, 3 mM 4 mM, 5 mM, 6 mM, 7 mM, 8 mM, 9 mM, 10 mM, 12 mM, 15 mM, 20 mM, or 25 mM.

[0368] In some embodiments, the buffer comprises, among others, borate, phosphate, 2-(N-morpholino) ethanesulfonic acid (MES), 3-(N-morpholino) propanesulfonic acid (MOPS), acetate, triethanolamine (TEoA), and 2-amino-2-hydroxymethyl-propane-1,3-diol (Tris), and the like. In some embodiments, the buffer concentration is from 1 to 200 mM, 5 to 200 mM, 1 to 150 mM, 5 to 150 mM, 1 to 100 mM, 5 to 100 mM, 1 to 50 mM, 5 to 50 mM, 1 to 20 mM, 5 to 20 mM, 1 to 10 mM, or 5 to 10 mM.

[0369] In some embodiments, the reaction conditions also include a ligation enhancing reagent, including, among others, polyethylene glycol (e.g., PEG 6000 and PEG 8000) or other molecular crowding reagents, for example bovine serum albumin (BSA), dextran, and Ficoll.

[0370] In some embodiments, ligation reaction is carried out at a suitable temperature and reaction time period. In some embodiments, the ligation reaction temperature is from about 2° C. to about 60° C. In some embodiments, the ligation reaction temperature is from 4° C. to 55° C., 4° C. to 50° C., 4° C. to 45° C., or 10° C. to 40° C. In some embodiments, the ligation reaction temperature is 2° C., 5° C., 10° C., 15° C., 20° C., 25° C., 30° C., 37° C., 40° C., 45° C., 50° C., 55° C., or 60° C. In some embodiments, the ligation reaction temperature can use different temperatures, for example a temperature at which stable hybrids are formed between polynucleotide substrate(s) followed by a higher temperature to promote completion of ligation reaction.

[0371] In some embodiments, the ligation reaction time can be a sufficient time for ligation of polynucleotide substrate(s). In some embodiments, the ligation reaction time is from 0.5-72 hr or longer. In some embodiments, the ligation reaction time is 1-72 hr, 2-48 hr, or 2-24 hr. In some embodiments, the ligation reaction time is 0.5, 1, 2, 4, 5, 12, 24, 48, or 72 hr or longer.

[0372] In some embodiments, the ligase reaction is carried out at a suitable pH. In some embodiments, the pH of the ligase reaction is about pH 5-9, about pH 5.5-8.5, about pH 6-8, or about pH 6.5-7.5. In some embodiments, the pH of the ligase reaction is about pH 5, about pH 5.5, about pH 6, about pH 6.5, about pH 7, about pH 7.5, about pH 8, about pH 8.5 or about pH 9.

[0373] In some embodiments, the RNA ligase substrate concentration is provided at a concentration of about 0.05 to about 25 mM, 0.1-20 mM, 0.1-15 mM, 1-10 mM, 2-8 mM, or 4-6 mM. In some embodiments, substrate concentration is at about 0.01-1 mM, 0.05-0.9 mM, 0.1-0.8 mM, 0.2-0.7 mM, or 0.3 mM-0.6 mM. In some embodiments, the substrate concentration is at about 0.01 mM, 0.05 mM, 0.1 mM, 0.2 mM, 0.3 mM, 0.4 mM, 0.5 mM, 0.6 mM, 0.7 mM, 0.8 mM, 0.9 mM or 1 mM, 1.5 mM, 2 mM, 2.5 mM, 3 mM, 3.5 mM, 4 mM, 4.5 mM, or 5 mM, or any appropriate concentration for efficient ligation of the substrate.

[0374] In some embodiments, the polynucleotide substrate is bound to a support, and the ligation reaction carried out with the engineered RNA ligase to ligate a polynucleotide substrate to the support bound polynucleotide, or ligate one or more polynucleotide substrates hybridized to the support-bound polynucleotide substrate.

[0375] In some embodiments, the ligase reaction further includes a nucleotide substrate regeneration system to regenerate co-factor substrate ATP (or dATP). In some embodiments, the ATP recycling or regeneration system includes a nucleoside monophosphate kinase for converting AMP to ADP in presence of a phosphate donor. Various nucleoside monophosphate kinase can be used for the conversion of AMP to ADP, including homologs of nucleoside monophosphate kinases. In some embodiments, more than one nucleoside monophosphate kinase can be used in the regeneration system. In some embodiments, the nucleoside monophosphate kinase is an adenosine monophosphate kinase (e.g., adenylate kinase), cytidine monophosphate (CMP) kinase, uridine monophosphate (UMP) kinase, or guanylate-monophosphate (GMP) kinase.

[0376] In some embodiments, a nucleoside monophosphate kinase useful in the enzymatic reactions is a cytidine monophosphate kinases. Various suitable cytidine monophosphate kinases are known in the art. These include homologs of cytidine monophosphate kinases. In some embodiments, a cytidine monophosphate kinase useful in the enzymatic reactions includes, among others, the cytidine monophosphate kinase of Thermus thermophilus (Q5SL35), Pyrococcus furiosus (Q8U2L4), Pseudomonas putida (AFO48857.1), Escherichia coli K-12 MG1655 (POA610), Clostridium acetobutylicum (Q97108), Halobacterium salinarum (Q9HPA5) Bacillus acidicola (WP_066270173), Acetobacter aceti (WP_010667744), Acidithiobacillus thiooxidans (WP_024892761.1), Acidithiobacillus ferrooxidans (WP_064220349.1), Metallosphaera sedula (WP_011921264.1), Amphibacillus xylanus (WP_015009966.1) Thioalkalivibrio denitrificans (WP_077278466.1), Vibrio psychroerythus (Q482G4), Pseudoalteromonas haloplanktis (Q3ILA1), Psychrobacter arcticus (Q4FRL5), Psychromonas ingrahamii (A1SZ01), Pseudomonas syringae (xQ4ZQ97) and Halobacterium salinarum (Q9HPA5).

[0377] In some embodiments, a nucleoside monophosphate kinase useful in the enzymatic reactions is a uridine monophosphate kinase. Various suitable uridine monophosphate kinases are known in the art. These include homologs of uridine monophosphate kinases. In some embodiments, a uridine monophosphate kinase useful in the enzymatic reactions includes, among others, the uridine monophosphate kinase of Pyrococcus furiosus (Q8U122), Thermus thermophilus (P43891), Pseudomonas putida (I7BW46), Escherichia coli K-12 MG1655 (P0ATE9), Aspergillus niger (A2R195), Saccharomyces cerevisiae (P15700), Clostridium acetobutylicum (Q97164) ATCC 824 PyrH Halobacterium salinarum (Q9HNN8), Picrophilus torridus (WP_048059653), Metallosphaera sedula (WP_012021705), Thermoplasma acidophilum (WP_010900913), Sulfolobus solfataricus (WP_009992427), Acetobacter aceti (WP_042788648), Thioalkalivibrio sp. HK1 (WP_081759172.1), Amphibacillus xylanus (WP_015010200.1), Vibrio psychroerythus (Q485G8), Pseudoalteromonas haloplanktis (Q3IIX6), Psychrobacter arcticus (Q4FRH5), Psychromonas ingrahamii (ABM04676.1), Pseudomonas syringae (Q4ZWS6), and Halobacterium salinarum (Q9HNN8).

[0378] In some embodiments, the nucleoside monophosphate kinase useful in the enzymatic reactions is a guanosine monophosphate kinase (guanylate kinase). Various suitable guanylate kinases are known in the art. These include homologs of guanylate kinases. In some embodiments, a guanylate kinase useful in the enzymatic reactions includes, among others, the guanylate kinase of Thermotoga maritima (Q9X215), Thermus thermophilus (Q5SI18), Pseudomonas putida (17C087), Escherichia coli K-12 (P60546), Aspergillus niger (A2QPV2), Saccharomyces cerevisiae (P15454), Clostridium acetobutylicum (Q97IDO), Acidithiobacillus ferrooxidans (WP_064219869.1), Acidithiobacillus thiooxidans (WP_010637919.1), Bacillus acidicola (WP_066264774.1), Acetobacter aceti (WP_018308252.1), Amphibacillus xylanus (WP_015010280.1), Thioalkalivibrio sulfidiphilus (WP_018953989.1), Vibrio psychroerythus (Q47UB3), Pseudoalteromonas haloplanktis (Q3IJH8), Psychrobacter arcticus (Q4FQY7), Psychromonas ingrahamii (A1T0P1), and Pseudomonas syringae (Q4ZZY8).

[0379] In some embodiments, the nucleoside monophosphate kinase useful in the enzymatic reactions is an adenosine monophosphate kinase (adenylate kinase). Various suitable adenylate kinases are known in the art. These include homologs of adenylate kinases. In some embodiments, the adenylate kinase is a bacterial, fungal, plant, or animal adenylate kinase. In some embodiments, an adenylate kinase useful in the enzymatic reactions includes, among others, adenylate kinases of Thermus thermophilus (Q72125), Pyrococcus furiosus (Q8U207), Pseudomonas putida (17CAA9), Escherichia coli K-12 W3110 (P69441), Aspergillus niger CBS 513.88 (A2QPN9), Saccharomyces cerevisiae (P07170), Clostridium acetobutylicum (Q97E39), Halobacterium salinarum (Q9HPAT), Acidithiobacillus thiooxidans (WP_024894015.1), Acidithiobacillus ferrooxidans (WP_064218420.1), Bacillus acidicola (WP_066267988.1), Sulfolobus solfataricus (WP_009991241.1), Saccharomyces cerevisiae (P07170), Thermotoga neapolitana (Q8GGL2), Escherichia coli (P69441) and Geobacillus stearothermophilus (WP_049624206.1). In some embodiments, the adenylate kinase is an engineered adenylate kinase described in International patent application No. PCT/US2024/051084, filed Oct. 11, 2024, incorporated herein by reference.

[0380] In some embodiments, the ATP regeneration system includes at least an enzyme for the conversion of ADP to ATP in presence of a phosphate donor. In some embodiments, the ATP regeneration system includes, among others, an acetate kinase, pyruvate kinase, creatine kinase, or polyphosphate kinase (see, e.g., Endo et al., Adv. Synth. Catal., 2002, 343:521-526; Andexer et al., Chem Bio Chem., 2015, 16:380-386). In the ATP regeneration system, the phosphate donor for the conversion of ADP to ATP is selected based on the ATP regenerating enzyme employed. By way of example and not limitation, if acetate kinase enzyme is used for conversion of ADP to ATP, the phosphate donor is acetyl-phosphate. If pyruvate kinase is used for the conversion of ADP to ATP, the phosphate donor is phosphoenolpyruvate. If creatine kinase is used for the conversion of ADP to ATP, the phosphate donor is creatine phosphate. If polyphosphate kinase is used for the conversion of ADP to ATP, the phosphate donor is inorganic polyphosphate.

[0381] Accordingly, in some embodiments, the ATP regenerating system includes pyruvate kinase and phosphoenolpyruvate. In some embodiments, the ATP regenerating system includes creatine kinase and creatine phosphate. In some embodiments, the ATP regenerating system includes polyphosphate kinase and inorganic polyphosphate. In some embodiments, the ATP regenerating system includes acetate kinase and acetyl phosphate. In some embodiments, the acetate kinase is an acetate kinase of Escherichia coli str. K-12 substr. MG1655 (NP_416799.1), Corynebacterium jeikeium K411 (WP_011272972.1), Lactococcus cremoris subsp. cremoris KW2 (WP_011835968.1), Lactococcus lactis (WP_004254593.1), Marinitoga sp. 38H-ov (WP_165147355.1), Thermotoga sp. KOL6 (WP_101510533.1), Thermosipho melaniensis (WP_012057479.1), Thermotoga sp. RQ7 (WP_041844042.1), and Thermosipho africanus (WP_004102380.1). In some embodiments, the acetate kinase is an engineered acetate kinase described in International patent application No. PCT/US2024/051118, filed Oct. 11, 2024, incorporated by reference herein.

[0382] In some embodiments, the engineered RNA ligase is used to ligate nicks or related nick structures (see, e.g., Cheng et al., Royal Soc Chem Adv., 2019, 9:8620-8627). In some embodiments, the engineered RNA ligase is used to synthesize RNAs from shorter oligonucleotides, for example by use of splint nucleic acids (see, e.g., Stark et al., RNA, 2006, 12:2014-2019). In some embodiments, the engineered RNA ligase is used to ligate modified oligonucleotides, such as provided in the Examples. Other examples of modified oligonucleotide products that can be synthesized using short oligonucleotide substrates, include, among others, shRNAs or siRNAs described in patent publications WO22104366, WO22029209, WO22031847, WO20226960, US2022072024, US2021238606, U.S. Pat. No. 11,286,488, US2017305956, WO22212153, WO22192519, WO22125490, WO22072447, WO21257568, WO21102373, WO21072395, WO21022108, US2022079971, U.S. Pat. No. 11,034,957, US2021332365, U.S. Pat. Nos. 11,015,201, 10,995,336, 11,091,759, 10,889,813, 10,130,651, 10,513,703, WO19232255, WO21108640, WO22147304, and WO21138537.

[0383] In a further aspect, the present disclosure provides a kit comprising an RNA ligase described herein. In some embodiments, the kit further comprises a buffer, a nucleotide substrate (e.g., ATP or dATP), and/or one or more polynucleotide ligase substrates. In some embodiments, the kit further comprises an additive or ligation enhancing agent, including one or more of polyethylene glycol (e.g., PEG 6000, PEG 8000, etc.) or other molecular crowding reagents, bovine serum albumin, Ficoll, dextran (e.g., Dextran 6000).

[0384] The following Examples, including experiments and results achieved, are provided for illustrative purposes only and are not to be construed as limiting the present invention.

### EXAMPLES

[0385] In the experimental disclosure below, the following abbreviations where relevant apply: ppm (parts per million); M (molar); mM (millimolar), uM and μM (micromolar); nM (nanomolar); mol (moles); gm and g (gram); mg (milligrams); ug and μg (micrograms); L and 1 (liter); ml and mL (milliliter); ul, μl, uL, μL (microliter); cm (centimeters); mm (millimeters); um and μm (micrometers); sec. (seconds); min(s) (minute(s)); h(s) and hr(s) (hour(s)); U (units); OD (optical density); MW (molecular weight); rpm (rotations per minute); rcf (relative centrifugal force); psi and PSI (pounds per square inch); ° C. (degrees Celsius); RT and rt (room temperature); NGS (next-generation sequencing); ds (double stranded); ss (single stranded); CDS (coding sequence); DNA (deoxyribonucleic acid); RNA (ribonucleic acid); E. coli W3110 (commonly used laboratory E. coli strain, available from the Coli Genetic Stock Center [CGSC], New Haven, CT); HTP (high throughput); HPLC (high pressure liquid chromatography); FPLC (fast protein liquid chromatography); PBS (phosphate buffered saline); BSA (bovine serum albumin); DTT (dithiothreitol); CAM (chloramphenicol); CAT (chloramphenicol acetyltransferase); IPTG (isopropyl β-D-1-thiogalactopyranoside); FIOPC (fold improvements over positive control); FIOP (fold improvements over parent); LB (Luria-Bertani); TB (Terrific-Broth).

### Example 1

E. coli Expression Hosts Containing Recombinant RNA Ligase 2 Genes

[0386] To produce enzyme, RNA ligase 2 genes were cloned in the pJV110900 vector system (see U.S. Pat. No. 10,184,117B2) operatively linked to the lac promoter under control of the lacI repressor. The expression vector also contains the P15a origin of replication and the chloramphenicol (CAM) resistance gene. The resulting plasmid was transformed into E. coli W3110, using standard methods known in the art. The transformants were isolated by subjecting the cells to CAM selection, as known in the art (See e.g., U.S. Pat. No. 8,383,346 and WO2010/144103).

### Example 2

### Preparation of HTP RNA Ligase 2 Containing Wet Cell Pellets

[0387] E. coli cells containing recombinant RNA ligase 2-encoding genes from monoclonal colonies were inoculated into 180 μL LB growth media containing 1% glucose and 30 μg/mL CAM in the wells of 96-well, shallow-well microtiter plates. The plates were sealed with air permeable seals, and cultures were grown overnight at 30° C., 200 rpm, and 85% humidity. Then, 10 μL of each of the cell cultures were transferred into the wells of 96-well, deep-well plates containing 390 mL TB growth media and 30 μg/mL CAM. The deep-well plates were sealed with air-permeable seals and incubated at 30° C., 250 rpm, and 85% humidity until an OD₆₀₀ of 0.6-0.8 was reached. The cell cultures were then induced by IPTG at a final concentration of 1 mM and incubated overnight under the same conditions prior to induction. The cells were then pelleted using centrifugation at 4,000 rpm for 10 min. The supernatants were discarded, and the pellets were frozen at −80° C. prior to lysis.

### Example 3

E. coli Shake Flake Expression and Purification of Recombinant RNA Ligase 2

[0388] To characterize improved enzyme variants after each round of evolution, shake flask production and purification was performed. HTP cultures grown, as described above, were thawed and 30 μL from each HTP culture was used to inoculate 1 L shake flasks containing: 160 mL Terrific Broth (TB) media (Teknova), 30 μg/mL chloramphenicol, 0.03% (v/v) lactose and 0.075% (v/v) glucose. The shake flasks were grown at 32° C. for 18 hours at 250 rpm. Following this incubation period, the cultures were centrifuged at 4,000 rpm for 10 min. The culture supernatant was discarded, and the pellets were resuspended in 30 mL of 50 mM Tris-HCl, pH 7.5. The cell suspension was chilled in an ice bath and lysed using a Microfluidizer cell disruptor (Microfluidics M-110L). The crude lysate was pelleted by centrifugation (10,000 rpm for 90 min at 4° C.), and the supernatant was then filtered through a 0.2 μm PES membrane to further clarify the lysate. The clarified lysates were then supplemented with 20 mM imidazole and 500 mM NaCl. The lysates were then purified using an AKTA Pure purification system and a 5 mL HisTrap FF column (Cytiva) using the run parameters provided below (Table 1). The wash buffer comprised of 50 mM Tris-HCl pH 8.0, 500 mM NaCl, 20 mM imidazole, 0.02% Triton X-100, and the elution buffer comprised of 50 mM Tris-HCl pH 8.0, 500 mM NaCl, 250 mM imidazole and 0.02% Triton X-100 in the following:

TABLE 1
FPLC run parameters

| Parameter | Volume | Units |
|---|---|---|
| Column volume | 5 | mL |
| Flow rate | 12 | mL/min |
| Pressure limit pre-column | 0.5 | MPa |
| Pressure limit delta-column | 0.3 | MPa |
| Sample volume | 50 | mL |
| Equilibration volume | 5 column volumes | |
| | (CV) = 25 mL | |
| Wash Unbound volume | 20 CV = 100 mL | |
| Elution | Isocratic (step) | |
| Elution volume | 5 CV = 25 mL | |
| Fraction volume | 1.5 | mL |
| RE-equilibration volume | 5 CV = 25 mL | |

[0389] The most concentrated fractions were identified by UV absorption (280 nm) and pooled; 3 ml of eluate was dialyzed overnight in 1× ligase storage buffer (40 mM Tris-HCl pH 7.5, 100 mM KCl, 0.1 mM EDTA, and 50% glycerol) in a 3K Slide-A-Lyzer™ dialysis cassette (Thermo Fisher) for buffer exchange. RNA ligase 2 concentrations from the preparations were measured by reading the absorption at 280 nm.

[0390] The purified RNA ligase 2 proteins were then screened by observing antisense strand (AS) conversion, sense strand (SS) conversion, and total conversion using the analytical method described in Example 15 and the results are shown in Tables 2.2 to 2.3.

### Example 4

### Measurement of Activity of Wild Type RNA Ligase 2 Samples

[0391] To determine the round one backbone, a set of nine enzymes were selected based on their homology to SEQ ID NO: 254. To test their activity, 0.27 g/L, 0.13 g/L, 0.07 g/L, 0.03 g/L, and 0.0033 g/L of each tested protein was assayed in reactions containing 20 g/L of the shortmer mix A, where each oligonucleotide is at 1.2 mM (Table 2.1) and 26.6% (v/v) reaction buffer. The reactions were incubated for 20 hours at 33° C. in a Multitron incubator with shaking at 700 rpm. Afterwards, EDTA was added to each reaction to a final concentration of 10 mM and the samples analyzed via HPLC to quantify the remaining fragment concentrations and product yields.

TABLE 2.1
Shortmer mix A components
Shortmer description

| | |
|---|---|
| 1 | U*-Af*-C*-Uf-G-Af-U |
| 2 | 5′-p-Cf-A-Af-A-Uf-A-Uf-G-Uf-U-Gf-A-Gf*-C |
| 3 | Tri-NAG*-invAb*-G-C-U-C-A-A-C-A |
| 4 | 5′-p-Uf-Af-Uf-U-U-G-A-U-C-A-G-U-A*-invAb |

[0392] In the above description of oligonucleotides, “-” represents a phosphate linkage; “*-” represents a phosphorothioate linkage; nucleotide N (e.g., A, G, U, C) represents a 2′-methoxy (2′-O-methyl) modified nucleotide; Nf represents a 2′-fluoro modified nucleotide; Tri-NAG represents a tri-antennary N-Acetyl galactosamine (GalNAc) ligand; invAb represents an inverted abasic residue (inverted abasic deoxyribonucleotide); and 5′-p represents 5′-phosphate. Further information regarding the full oligonucleotide construct can be found, for example, in U.S. Pat. No. 10,995,335 to Arrowhead Pharmaceuticals, Inc.

[0393] Oligonucleotide 1 base pairs with oligonucleotide 4, and oligonucleotide 2 base pairs with oligonucleotides 3 and 4. Oligonucleotides 1-4 when hybridized form a nick between the 3′-end of oligonucleotide 1 and 5-end of oligonucleotide 2, and a nick between the 3′-end of oligonucleotide 3 and the 5′-end of oligonucleotide 4. Ligation of oligonucleotides 1 and 2 results in formation of the anti-sense strand, and ligation of oligonucleotides 3 and 4 results in formation of the sense strand.

[0394] Percent conversions were calculated as in the following using analytical method in Example 13 and the results are shown in Tables 2.2 to 2.4:

$$Antisense A strand conversion : \% conversion = \frac{Area under the curve for anti sense strand product SEQ I D 557}{Total area under the curve for all products and substrates} * 100 \%$$

$$Sense strand A conversion : \% conversion = \frac{Area under the curve for sense strand product SEQ I D 556}{Total area under the curve for all products and substrates} * 100 \%$$

$$Total A conversion : Sum of antisense A strand conversion and sense A strand conversion .$$

TABLE 2.2
RNA Ligase sense A strand conversion relative to SEQ ID NO: 254

| | | Pos Control FIOP Relative to SEQ ID NO: 254 | | | | |
|---|---|---|---|---|---|---|
| | | (Sense Strand Conversion) | | | | |
| SEQ ID NO: | | 0.27 | 0.13 | 0.03 | 0.07 | 0.003 |
| (nt/aa) | Organism | g/L | g/L | g/L | g/L | g/L |
| 1/2 | Escherichia phage RB69 | ++ | ++ | ++ | ++ | ++++ |
| 255/256 | Escherichia phage vB_EcoM JS09 | + | + | | | |
| 257/258 | Escherichia phage Bp7 | ++ | ++ | ++ | ++ | |
| 259/260 | Escherichia phage vB_EcoM VR7 | ++ | ++ | ++ | ++ | + |
| 261/262 | Enterobacter phage PG7 | ++ | ++ | ++ | ++ | + |
| 263/264 | Salmonella phage S16 (Salmonella phage | ++ | ++ | ++ | ++ | |
| | vB_SenM-S16) | | | | | |
| 265/266 | Acinetobacter phage ZZ1 | ++ | ++ | ++ | ++ | |
| 267/268 | Klebsiella phage KP27 | ++ | + | + | + | |
| 221/222 | Aeromonas phage CC2 | ++ | ++ | ++ | ++ | |

Levels of increased activity were determined relative to the reference polypeptide of SEQ ID NO: 254 and defined as follows: “+” >0.15 “++” >0.85, “+++” >1.2, “++++” >2.

TABLE 2.3
RNA Ligase antisense A strand conversion relative to SEQ ID NO: 254

| | | Pos Control FIOP Relative to SEQ ID NO: 254 | | | | |
|---|---|---|---|---|---|---|
| | | (Antisense A Strand Conversion) | | | | |
| SEQ ID NO: | | 0.27 | 0.13 | 0.03 | 0.07 | 0.003 |
| (nt/aa) | Organism | g/L | g/L | g/L | g/L | g/L |
| 1/2 | Escherichia phage RB69 | +++ | +++ | +++ | +++ | |
| 255/256 | Escherichia phage vB_EcoM JS09 | + | | | | |
| 257/258 | Escherichia phage Bp7 | +++ | ++ | ++ | ++ | |
| 259/260 | Escherichia phage vB_EcoM_VR7 | +++ | +++ | +++ | +++ | |
| 261/262 | Enterobacter phage PG7 | +++ | +++ | +++ | +++ | |
| 263/264 | Salmonella phage S16 (Salmonella | +++ | +++ | +++ | +++ | |
| | phage vB_SenM-S16) | | | | | |
| 265/266 | Acinetobacter phage ZZ1 | ++ | ++ | + | + | |
| 267/268 | Klebsiella phage KP27 | ++++ | ++++ | ++ + | ++++ | |
| 221/222 | Aeromonas phage CC2 | ++++ | ++++ | ++++ | ++++ | |

Levels of increased activity were determined relative to the reference polypeptide of SEQ ID NO: 254 and defined as follows: “+” >0.15 “++” >0.85, “+++” >1.2, “++++” >2.

TABLE 2.4
RNA Ligase A total conversion relative to SEQ ID NO: 254

| | | Pos Control FIOP Relative to SEQ ID NO: 254 | | | | |
|---|---|---|---|---|---|---|
| | | (Total A Conversion) | | | | |
| SEQ ID NO: | | 0.27 | 0.13 | 0.03 | 0.07 | 0.003 |
| (nt/aa) | Organism | g/L | g/L | g/L | g/L | g/L |
| 1/2 | Escherichia phage RB69 | ++ | ++ | ++ | ++ | ++++ |
| 255/256 | Escherichia phage | + | | | | |
| | vB_EcoM_JS09 | | | | | |
| 257/258 | Escherichia phage Bp7 | ++ | ++ | ++ | ++ | |
| 259/260 | Escherichia phage | ++ | ++ | ++ | ++ | + |
| | vB_EcoM_VR7 | | | | | |
| 261/262 | Enterobacter phage PG7 | ++ | ++ | ++ | ++ | + |
| 263/264 | Salmonella phage S16 | ++ | ++ | ++ | ++ | |
| | (Salmonella phage vB_SenM- | | | | | |
| | S16) | | | | | |
| 265/266 | Acinetobacter phage ZZ1 | ++ | ++ | ++ | ++ | |
| 267/268 | Klebsiella phage KP27 | ++ | ++ | ++ | ++ | |
| 221/222 | Aeromonas phage CC2 | ++ | ++ | ++ | ++ | |

Levels of increased activity were determined relative to the reference polypeptide of SEQ ID NO: 254 and defined as follows: “+” >0.15 “++” >0.85, “+++” >1.2, “++++” >2.

[0395] The RNA ligase of SEQ ID NO: 2 was selected as the round one backbone due to it displaying the highest activity at low enzyme load (e.g. 0.0033 g/L).

### Example 5

### Improvements Over SEQ ID NO: 2 in RNA Ligase 2 Activity

[0396] The RNA ligase of SEQ ID NO: 2 was selected as the parent enzyme after screening for activity as described in Example 4. Libraries of engineered genes were produced using known techniques (e.g., saturation mutagenesis, recombination of previously identified beneficial mutations, etc.). The polypeptides encoded by each gene were produced in HTP as described in Example 1, and the cell paste was generated as described in Example 2.

[0397] To prepare cells for lysis, 300 μL of 0.1 mg/mL lysozyme in 50 mM TRIS-HCl buffer at pH 7.5 was added to the cell paste of each sample. After thorough resuspension, the cells were incubated at 41° C. for 1 hour in a PCR thermocycler. The samples were then centrifuged for 10 minutes at 4,000 rpm and 4° C. and the clarified supernatants were used in subsequent biocatalytic reactions.

[0398] To screen the enzyme variants, lysate, 10% (v/v) final concentration, was transferred into 96-well shallow well plates containing 20 g/L of the shortmer mix (Table 2.1) and 26.6% (v/v) reaction buffer. The reactions were incubated for 20 hours at 33° C. in a Multitron (Infors) with shaking at 700 rpm. Afterwards, EDTA was added to each reaction to a final concentration of 10 mM and the samples analyzed via HPLC to quantify the remaining fragment concentrations and product yields.

[0399] Using peak areas determined using the analytical method described in Example 13, the percent conversion for each sample was calculated as described in Example 4. The conversion results are shown in Table 3. Activity relative to SEQ ID NO: 2 (FIOP) was calculated as the percent conversion formed by the variant over percent conversion of SEQ ID NO: 2 and shown in Table 3.

TABLE 3
RNA ligase activity for total A conversion,
antisense A strand conversion, and sense A
strand conversion relative to SEQ ID NO: 2

| | | | Pos Control | |
|---|---|---|---|---|
| | Amino Acid | | FIOP Anti | Pos Control |
| SEQ | Differences | Pos Control | Sense | FIOP Sense |
| ID NO: | (Relative to | FIOP Total | A Strand | A Strand |
| (nt/aa) | SEQ ID NO: 2) | AConversion | Conversion | Conversion |
| 3/4 | L179F | ++ | +++ | ++ |
| 5/6 | A184P | ++ | +++ | ++ |
| 7/8 | E196K | ++ | +++ | ++ |
| 9/10 | T92A | ++ | +++ | ++ |
| 11/12 | V40E | ++ | +++ | ++ |
| 13/14 | V82I | ++ | +++ | ++ |
| 15/16 | Y32R | ++ | +++ | ++ |
| 17/18 | I207T | ++ | +++ | ++ |
| 19/20 | T33K | ++ | +++ | ++ |
| 21/22 | G114K | ++ | +++ | ++ |
| 23/24 | S171E | ++ | +++ | ++ |
| 25/26 | T33A | ++ | +++ | ++ |
| 27/28 | F221E | ++ | +++ | ++ |
| 29/30 | I207S | ++ | +++ | ++ |
| 31/32 | F202W | ++ | ++ | ++ |
| 33/34 | R101G | ++ | ++ | ++ |
| 35/36 | A184R | ++ | ++ | ++ |
| 37/38 | N141C | ++ | ++ | ++ |
| 39/40 | N60R | ++ | ++ | ++ |
| 41/42 | A184L | ++ | ++ | ++ |
| 43/44 | Y98R | ++ | ++ | + |
| 45/46 | F96S | + | ++ | + |
| 47/48 | N205V | + | ++ | + |
| 49/50 | S191K | + | ++ | + |
| 51/52 | D193N | + | ++ | + |
| 53/54 | N141A | + | ++ | + |
| 55/56 | N320K | + | ++ | + |
| 57/58 | M174Q | + | ++ | + |
| 59/60 | Y98D | + | ++ | + |
| 61/62 | L71K | + | ++ | + |
| 63/64 | T142R | + | ++ | + |
| 65/66 | E57T | + | ++ | + |
| 67/68 | N320D | + | + | + |
| 69/70 | N205R | + | ++ | + |
| 71/72 | D209L | + | ++ | + |
| 73/74 | T145D | + | ++ | + |
| 75/76 | K14R | + | ++ | + |
| 77/78 | D209E | + | ++ | + |
| 79/80 | V342I | + | ++ | + |
| 81/82 | P255E | + | + | + |
| 83/84 | V327Q | + | ++ | + |
| 85/86 | D170E | + | ++ | + |
| 87/88 | N141E | + | + | + |
| 89/90 | Y98P | + | ++ | + |
| 91/92 | I339K | + | ++ | + |
| 93/94 | T38D | + | + | + |
| 95/96 | T142H | + | + | + |
| 97/98 | D75Q | + | + | + |
| 99/100 | A184M | + | + | + |
| 101/102 | V342T | + | + | |
| 103/104 | I339R | | ++ | |

Levels of increased activity were determined relative to the reference polypeptide of SEQ ID NO: 2 and defined as follows: “+” >1, “++” >1.2, “+++” >2.

### Example 6

### Improvements Over SEQ ID NO: 4 in RNA Ligase 2 Activity

[0400] The engineered RNA ligase of SEQ ID NO: 4 was selected as the parent enzyme after screening variants as described in Example 5 above. Libraries of engineered genes were produced using known techniques (e.g., saturation mutagenesis, recombination of previously identified beneficial mutations, etc.). The polypeptides encoded by each gene were produced in HTP as described in Example 1 and the cell paste was generated as described in Example 2.

[0401] The variants were prepared and screened as described in Example 5, except 600 μL was used as the lysis volume. The conversion results are shown in Table 4. Activity relative to SEQ ID NO: 4 (FIOP) was calculated as the percent conversion formed by the variant over the percent conversion of SEQ ID NO:

TABLE 4
RNA ligase activity for total A conversion, antisense A strand conversion,
and sense A strand conversion relative to SEQ ID NO: 4

| | | | Pos Control | Pos Control |
|---|---|---|---|---|
| SEQ ID | Amino Acid | Pos Control | FIOP Anti | FIOP Sense |
| NO: | Differences | FIOP Total A | Sense A Strand | A Strand |
| (nt/aa) | (Relative to SEQ ID NO: 4) | Conversion | Conversion | Conversion |
| 105/106 | T33A/R101G/F221E/N320D/R335E/P336S/ | + | +++ | + |
| | 1339R | | | |
| 107/108 | L71K/T92A/S171E/A184P/F202W | + | +++ | + |
| 109/110 | V40E/T92A/S171E/F202W/V327Q | + | ++ | + |
| 111/112 | E196K/Q300K/R335E/I339R | + | ++ | + |
| 113/114 | T33A/A184R/F221E/Q300K/N320D | + | ++ | + |
| 115/116 | R335E/P336S/I339R | + | ++ | + |
| 117/118 | A184P/E196K/F221E/P336S | + | +++ | + |
| 119/120 | T33K/A184R/N320D/R335E/P336S | + | ++ | + |
| 121/122 | I207T/D209L/F221E/Q300K/N320D/P336S/ | + | +++ | + |
| | I339R | | | |
| 123/124 | R101G/E196K/F221E/Q300K/R335E | + | ++ | + |
| 125/126 | I207T/D209L/Q300K/N320D | + | ++ | + |
| 127/128 | V40E/D170E/S171E/F202W/V327Q | + | +++ | + |
| 129/130 | T33K/R101G/A184R/E196K/D209L/P336S/ | + | ++ | + |
| | I339R | | | |
| 131/132 | V40E/L71K/T92A/S171E/A184P/V327Q | + | ++ | + |
| 133/134 | I207T/R335E/P336S/I339R | + | ++ | + |
| 135/136 | T33K/R101G/E196K/Q300K/N320D/R335E/ | + | ++ | + |
| | P336S/I339R | | | |
| 137/138 | E57T/S171E/F179L/A184P/F202W/V327Q | + | ++ | + |
| 139/140 | E57T/T92A/F202W/V327Q | + | ++ | + |
| 141/142 | T33K/R101G/I207T/F221E/Q300K/R335E/ | + | ++ | + |
| | P336S/I339R | | | |
| 143/144 | T33K/F221E/P336S | + | ++ | + |
| 145/146 | E196K/F221E/Q300K/R335E/P336S/I339R | + | ++ | + |
| 147/148 | T33K/A184P/F221E/P336S/I339R | + | +++ | + |
| 149/150 | T33A/A184P/E196K/F221E/Q300K | + | ++ | + |
| 151/152 | R101G/E196K/I207T/D209L/F221E/Q300K/ | + | +++ | + |
| | P336S/I339R | | | |
| 153/154 | R101G/A184R/R335E/P336S/I339R | + | ++ | + |
| 155/156 | T33A/A184L/E196K/N320D/P336S/I339R | + | ++ | + |
| 157/158 | T33A/A184P/E196K/Q300K/N320D/R335H/ | + | +++ | + |
| | P336S/I339R | | | |
| 159/160 | A184L/N320D/R335E/P336S/I339R | + | ++ | + |
| 161/162 | A184L/E196K/I207T/D209L/Q300K/R335E/ | + | ++ | + |
| | P336S/I339R | | | |
| 163/164 | A184R/E196K/N320D/R335E/P336S/I339R | + | ++ | + |
| 165/166 | T33K/E196K/D209L/F221E/I339R | + | ++ | + |
| 167/168 | A184R/N320D/R335E/P336S/I339R | + | ++ | + |
| 169/170 | R101G/D209L/R335E/P336S/I339R | + | ++ | + |
| 171/172 | R101G/E196K/D209L/I339R | + | ++ | + |
| 173/174 | V40E/L71K/V82I/D170E/S171E/F179L/ | + | ++ | + |
| | F202W/V327Q | | | |
| 175/176 | N320D/R335E/P336S/I339R | + | ++ | + |
| 177/178 | R101G/A184L/Q300K/R335E/P336S/I339R | + | ++ | + |
| 179/180 | T33K/R101G/E196K/D209L/R335E/P336S/ | + | ++ | + |
| | I339R | | | |
| 181/182 | T33K/E196K/Q300K/N320D | + | ++ | + |
| 183/184 | F221E/R335E | + | ++ | + |
| 185/186 | T33K/A184R/E196K/I207S/F221E | + | ++ | + |
| 187/188 | F221E/R335E/P336S/I339R | + | ++ | + |
| 189/190 | E196K/D209L/Q300K/R335E/P336S/I339R | + | ++ | + |
| 191/192 | A184P/E196K/Q300K/N320D | + | ++ | + |
| 193/194 | E57T/S171E/F202W/V327Q | + | ++ | + |
| 195/196 | V40E/L71K/S171E/A184P | + | ++ | + |
| 197/198 | A184L/E196K/F221E | + | ++ | + |
| 199/200 | T33A/E196K/I207S/R335E/P336S | + | ++ | + |
| 201/202 | Y32R/E57T/L71K/F202W/V327Q/V342I | + | ++ | + |
| 203/204 | T33A/E196K/F221E/P336S | + | ++ | + |
| 205/206 | R101G/F221E/Q300K/N320D/R335E/ | + | ++ | + |
| | P336S/I339R | | | |
| 207/208 | T33K/A184P/N320D/R335H/P336S | + | ++ | + |
| 209/210 | T33K/R101G/I207S/F221E | + | ++ | + |
| 211/212 | R101G/A184R/E196K/D209L/F221E | + | ++ | + |
| 213/214 | T33A/I207S/D209L/Q300K/R335E/P336S/ | + | ++ | + |
| | I339R | | | |
| 215/216 | T33K/L83P/A184P/E196K/Q300K/P336S | + | ++ | + |

Levels of increased activity were determined relative to the reference polypeptide of SEQ ID NO: 4 and defined as follows: “+” >1, “++” >1.2, “+++” >2.

### Example 7

### Improvements Over SEQ ID NO: 106 in RNA Ligase 2 Activity

[0402] The engineered RNA ligase of SEQ ID NO: 106 was selected as the parent enzyme after screening variants as described in Example 6 above. Libraries of engineered genes were produced using known techniques (e.g., saturation mutagenesis, recombination of previously identified beneficial mutations, etc.). The polypeptides encoded by each gene were produced in HTP as described in Example 1 and the cell paste was generated as described in Example 2.

[0403] The variants were prepared and screened as described in Example 5, except 1200 μL was used as the lysis volume. The conversion results are shown in Table 5. Activity relative to SEQ ID NO: 106 (FIOP) was calculated as the percent conversion formed by the variant over percent conversion of SEQ ID NO: 106.

TABLE 5
RNA ligase activity for total A conversion, antisense A strand conversion,
and sense A strand conversion relative to SEQ ID NO: 106

| | | | Pos Control | Pos Control |
|---|---|---|---|---|
| | Amino Acid | Pos Control | FIOP Anti Sense | FIOP Sense |
| SEQ ID NO: | Differences | FIOP Total A | A Strand | A Strand |
| (nt/aa) | (Relative to SEQ ID NO: 106) | Conversion | Conversion | Conversion |
| 217/218 | T38D/L71K/G114N/A184M/S191K/ | + | ++ | + |
| | E196K | | | |
| 219/220 | N141A/D170E/S171E/M174Q | + | ++ | + |
| 223/224 | G114R | + | ++ | + |
| 225/226 | E57T/N60R/D170E/S171E/M174Q/ | + | ++ | + |
| | E192V/E196K/D320K | | | |
| 227/228 | N60R/T92A/D170E/S171E | + | ++ | + |
| 229/230 | N141A/M174Q/E196K | + | ++ | + |
| 231/232 | E57T/D170E/S171E/M174Q | + | ++ | + |
| 233/234 | N141T/A184P | + | ++ | + |
| 235/236 | E57T/N60R/N141A/D170E/S171E/ | + | ++ | + |
| | M174Q/E192V | | | |
| 237/238 | N60R/D170E/M174Q | + | ++ | + |
| 239/240 | N141C/D170E/S171E | + | ++ | + |
| 241/242 | P69L/L71K/G114N/A184M | + | ++ | |
| 243/244 | T38D/V40E | + | ++ | + |
| 245/246 | V40E/L71K/Y98R/A184M/I259V | + | ++ | + |
| 247/248 | Y32R/N60R/N141A/D170E/S171E/ | + | ++ | + |
| | M174Q/E196K/D320K | | | |
| 249/250 | Y32R/D170E/I207T/D320K | + | + | + |
| 251/252 | E196K | + | + | + |

Levels of increased activity were determined relative to the reference polypeptide of SEQ ID NO: 106 and defined as follows: “+” >1, “++” >1.2.

### Example 8

### Improvements Over SEQ ID NO: 218 in RNA Ligase 2 Activity

[0404] The engineered RNA ligase of SEQ ID NO: 218 was selected as the parent enzyme after screening for activity as described in Example 7. Libraries of engineered genes were produced using known techniques (e.g., saturation mutagenesis, recombination of previously identified beneficial mutations, etc.). The polypeptides encoded by each gene were produced in HTP as described in Example 1, and the cell paste was generated as described in Example 2.

[0405] To prepare cells for lysis, 600 μL of 0.1 mg/mL lysozyme in 50 mM TRIS-HCl buffer at pH 7.5 was added to the cell paste of each sample. After thorough resuspension, the cells were incubated at 43° C. for 1 hour in a PCR thermocycler. The samples were then centrifuged for 10 minutes at 4,000 rpm and 4° C. and the clarified supernatants were used in subsequent biocatalytic reactions.

[0406] To screen the enzyme variants, lysate, 1.25 or 2.5% (v/v) final concentration, was transferred into 96-well shallow well plates containing 20 g/L of the shortmer mix A (Table 2.1) and 26.6% (v/v) reaction buffer. The reactions were incubated for 4 hours at 33° C. in a Multitron (Infors) with shaking at 700 rpm. Afterwards, EDTA was added to each reaction to a final concentration of 10 mM and the samples analyzed via HPLC to quantify the remaining fragment concentrations and product yields.

[0407] Using peak areas determined using the analytical method described in Example 15, the percent conversion for each sample was calculated as described in Example 4. The conversion results are shown in Table 6. Activity relative to SEQ ID NO: 218 (FIOP) was calculated as the percent conversion formed by the variant over percent conversion of SEQ ID NO: 218 and shown in Table 6.

TABLE 6
RNA ligase activity for total A conversion,
antisense A strand conversion, and sense A
strand conversion relative to SEQ ID NO: 218

| | | | Pos Control | |
|---|---|---|---|---|
| | Amino Acid | | FIOP Anti | Pos Control |
| SEQ | Differences | Pos Control | Sense | FIOP Sense |
| ID NO: | (Relative to | FIOP Total A | A Strand | A Strand |
| (nt/aa) | SEQ ID NO: 218) | Conversion | Conversion | Conversion |
| 269/270 | A102T | ++ | ++ | ++ |
| 271/272 | S17P | ++ | +++ | ++ |
| 273/274 | A190F | ++ | ++ | ++ |
| 275/276 | Y16R | ++ | ++ | ++ |
| 277/278 | G68W | | ++ | |
| 279/280 | Y23M | | + | |
| 281/282 | Y270A | | +++ | |
| 283/284 | Q117K/T229A | | +++ | |
| 285/286 | Q117W | | +++ | |
| 287/288 | Q117T | ++ | ++ | ++ |
| 289/290 | Q117H | + | ++ | + |
| 291/292 | Q117A | ++ | ++ | ++ |
| 293/294 | Q117M | | +++ | |
| 295/296 | Q117G | +++ | +++ | +++ |
| 297/298 | Q117I | ++ | + | ++ |
| 299/300 | Q117K | + | +++ | |
| 301/302 | Q117R | | +++ | |
| 303/304 | Q117S | ++ | ++ | ++ |
| 305/306 | Q117V | +++ | | +++ |
| 307/308 | Q117F | | +++ | |
| 309/310 | Q117C | +++ | ++ | +++ |
| 311/312 | Q117L | ++ | ++ | ++ |

Levels of increased activity were determined relative to the reference polypeptide of SEQ ID NO: 218 and defined as follows: “+” >1, “++” >1.2, “+++” >2

### Example 9

### Improvements Over SEQ ID NO: 286 in RNA Ligase 2 Activity

[0408] The engineered RNA ligase of SEQ ID NO: 286 was selected as the parent enzyme after screening for activity as described in Example 8. Libraries of engineered genes were produced using known techniques (e.g., saturation mutagenesis, recombination of previously identified beneficial mutations, etc.). The polypeptides encoded by each gene were produced in HTP as described in Example 1, and the cell paste was generated as described in Example 2.

[0409] To prepare cells for lysis, 600 μL of 0.1 mg/mL lysozyme in 50 mM TRIS-HCl buffer at pH 7.5 was added to the cell paste of each sample. After thorough resuspension, the cells were incubated at 43° C. for 1 hour in a PCR thermocycler. The samples were then centrifuged for 10 minutes at 4,000 rpm and 4° C. and the clarified supernatants were used in subsequent biocatalytic reactions.

[0410] To screen the enzyme variants, lysate, 2.5% (v/v) final concentration, was transferred into 96-well shallow well plates containing 20 g/L of the shortmer mix A (Table 2.1) and 26.6% (v/v) reaction buffer. The reactions were incubated for 4 hours at 33° C. in a Multitron (Infors) with shaking at 700 rpm. Afterwards, EDTA was added to each reaction to a final concentration of 10 mM and the samples analyzed via HPLC to quantify the remaining fragment concentrations and product yields.

[0411] Using peak areas determined using the analytical method described in Example 15, the percent conversion for each sample was calculated as described in Example 4. The conversion results are shown in Table 7.1 and 7.2. Activity relative to SEQ ID NO: 286 (FIOP) was calculated as the percent conversion formed by the variant over percent conversion of SEQ ID NO: 286 and shown in Table 7.1 and 7.2.

TABLE 7.1
RNA ligase activity for total A conversion,
antisense A strand conversion, and sense A
strand conversion relative to SEQ ID NO: 286

| | | | Pos Control | |
|---|---|---|---|---|
| | Amino Acid | | FIOP Anti | Pos Control |
| SEQ | Differences | Pos Control | Sense | FIOP Sense |
| ID NO: | (Relative to | FIOP Total A | A Strand | A Strand |
| (nt/aa) | SEQ ID NO: 286) | Conversion | Conversion | Conversion |
| 313/314 | G296E | +++ | +++ | ++ |
| 315/316 | N114V/W117K | +++ | +++ | ++ |
| 317/318 | K26S | +++ | +++ | ++ |
| 319/320 | K30C | +++ | +++ | ++ |
| 321/322 | W117K/K118G | ++ | +++ | ++ |
| 323/324 | N114P/W117K | ++ | +++ | ++ |
| 325/326 | N114S/W117K | ++ | +++ | ++ |
| 327/328 | G296L | ++ | +++ | ++ |
| 329/330 | W117K/G119S | ++ | ++ | +++ |
| 331/332 | K26P | ++ | ++ | ++ |
| 333/334 | K14F | ++ | ++ | ++ |
| 335/336 | N114G/W117K | ++ | +++ | + |
| 337/338 | N114F/W117K | ++ | ++ | ++ |
| 339/340 | W117K/G119A | ++ | ++ | ++ |
| 341/342 | L183V | ++ | ++ | ++ |
| 343/344 | K26R | ++ | ++ | ++ |
| 345/346 | W117K | ++ | ++ | + |
| 347/348 | G296R | ++ | ++ | ++ |
| 349/350 | A185S | ++ | ++ | ++ |
| 351/352 | K26F | ++ | ++ | ++ |
| 353/354 | W117K/K118L | ++ | ++ | ++ |
| 355/356 | S307A | ++ | ++ | ++ |
| 357/358 | K30R | ++ | ++ | ++ |
| 359/360 | M12S | ++ | ++ | ++ |
| 361/362 | V93A/N135T | ++ | ++ | ++ |
| 363/364 | W117K/K118Q | ++ | ++ | + |
| 365/366 | A185H | ++ | ++ | ++ |
| 367/368 | N135Q | ++ | ++ | + |
| 369/370 | T92M | + | ++ | + |
| 371/372 | P288A | + | ++ | + |
| 373/374 | T92N | + | + | + |
| 375/376 | K14W | + | ++ | + |
| 377/378 | W117K/G119T | + | | ++ |
| 379/380 | T92S | + | + | + |
| 381/382 | T92G | + | + | + |
| 383/384 | W117K/V120P | + | | ++ |
| 385/386 | Y79W | + | ++ | + |
| 387/388 | A100R | + | + | + |
| 389/390 | T287A | + | + | + |

Levels of increased activity were determined relative to the reference polypeptide of SEQ ID NO: 286 and defined as follows: “+” >1, “++” >1.2, “+++” >2

TABLE 7.2
RNA ligase activity for total A conversion,
antisense A strand conversion, and sense A
strand conversion relative to SEQ ID NO: 286

| | | | Pos Control | |
|---|---|---|---|---|
| | Amino Acid | | FIOP Anti | Pos Control |
| SEQ | Differences | Pos Control | Sense A | FIOP Sense |
| ID NO: | (Relative to | FIOP Total A | Strand | A Strand |
| (nt/aa) | SEQ ID NO: 286) | Conversion | Conversion | Conversion |
| 391/392 | W117K/G119E | ++ | ++ | ++ |
| 393/394 | G296V | ++ | ++ | + |
| 395/396 | G292E | +++ | +++ | ++ |
| 397/398 | K26H | ++ | ++ | ++ |
| 399/400 | G296W | ++ | ++ | ++ |
| 401/402 | K30H | +++ | +++ | +++ |
| 403/404 | K26G | +++ | +++ | +++ |
| 405/406 | K30A | +++ | +++ | +++ |
| 407/408 | S25W | +++ | +++ | +++ |
| 409/410 | S25L | +++ | +++ | +++ |
| 411/412 | K26V | +++ | +++ | +++ |
| 413/414 | K26L | +++ | +++ | +++ |
| 415/416 | T92E | ++ | ++ | ++ |
| 417/418 | K14T | +++ | +++ | +++ |
| 419/420 | D75T | ++ | ++ | ++ |
| 421/422 | S25G | ++ | ++ | ++ |
| 423/424 | V327W | ++ | ++ | ++ |
| 425/426 | F111L | | | ++ |

Levels of increased activity were determined relative to the reference polypeptide of SEQ ID NO: 286 and defined as follows: “+” >1, “++” >1.2, “+++” >2

### Example 10

### Improvements Over SEQ ID NO: 396 in RNA Ligase 2 Activity

[0412] The engineered RNA ligase of SEQ ID NO: 396 was selected as the parent enzyme after screening variants as described in Example 9 above. Libraries of engineered genes were produced using known techniques (e.g., saturation mutagenesis, recombination of previously identified beneficial mutations, etc.). The polypeptides encoded by each gene were produced in HTP as described in Example 1 and the cell paste was generated as described in Example 2.

[0413] To prepare cells for lysis, 600 μL of 0.1 mg/mL lysozyme in 50 mM TRIS-HCl buffer at pH 7.5 was added to the cell paste of each sample. After thorough resuspension, the cells were incubated at 43° C. for 1 hour in a PCR thermocycler. The samples were then centrifuged for 10 minutes at 4,000 rpm and 4° C. and the clarified supernatants were used in subsequent biocatalytic reactions.

[0414] To screen the enzyme variants, 2.5% (v/v) final concentration was transferred into 96-well shallow well plates containing 20 g/L of the shortmer mix A (Table 2.1) and 26.6% (v/v) reaction buffer. Lysate was transferred into 96-well shallow well plates containing 20 g/L of the shortmer mix (Table 2.1) and 26.6% (v/v) reaction buffer. The reactions were incubated for 4 hours at 33° C. in a Multitron (Infors) with shaking at 700 rpm. Afterwards, EDTA was added to each reaction to a final concentration of 10 mM and the samples analyzed via HPLC to quantify the remaining fragment concentrations and product yields.

[0415] The conversion results are shown in Table 8. Activity relative to SEQ ID NO: 396 was calculated as the percent conversion formed by the variant over percent conversion of SEQ ID NO: 396.

TABLE 8
RNA ligase activity for total A conversion, antisense A strand conversion,
and sense A strand conversion relative to SEQ ID NO: 396

| | Amino Acid | | Pos Control | Pos Control |
|---|---|---|---|---|
| SEQ ID | Differences | Pos Control | FIOP Anti | FIOP Sense |
| NO: | (Relative to | FIOP Total A | Sense A Strand | A Strand |
| (nt/aa) | SEQ ID NO: 396) | Conversion | Conversion | Conversion |
| 427/428 | A102T/G119E | ++ | | ++ |
| 429/430 | D75T/A102T | ++ | ++ | ++ |
| 431/432 | D75T/A102T/W117M | ++ | | +++ |
| 433/434 | D75T/G119E | | | ++ |
| 435/436 | D75T/T136A/G296W | +++ | ++ | +++ |
| 437/438 | D75T/V327W | + | + | ++ |
| 439/440 | D75T/W117K/G119E | ++ | ++ | ++ |
| 441/442 | G119E | + | | ++ |
| 443/444 | G119E/G296W | + | | ++ |
| 445/446 | K14T/A102T/G119E | ++ | + | +++ |
| 447/448 | K14T/A102T/G296W | ++ | ++ | ++ |
| 449/450 | K14T/D75T | +++ | ++ | +++ |
| 451/452 | K14T/D75T/G119E | ++ | | ++ |
| 453/454 | K14T/D75T/G119E/V327W | ++ | | +++ |
| 455/456 | K14T/D75T/W117M/G119E | ++ | | +++ |
| 457/458 | K14T/D75T/W117M/G119E/G296W | ++ | | +++ |
| 459/460 | K14T/G119E | ++ | | +++ |
| 461/462 | K14T/G296W | + | | ++ |
| 463/464 | K14T/K30H/Y270A | ++ | + | ++ |
| 465/466 | K14T/S25G | +++ | ++ | +++ |
| 467/468 | K14T/W117K | + | ++ | |
| 469/470 | K14T/W117K/G119E | ++ | ++ | + |
| 471/472 | K14T/W117M/G119E | ++ | | +++ |
| 473/474 | K14T/W117M/G119E/G296W | ++ | | +++ |
| 475/476 | K14T/W117M/G296W/V327W | + | | ++ |
| 477/478 | K26V/D75T/V327W | ++ | ++ | ++ |
| 479/480 | S25L/D75T | ++ | ++ | +++ |
| 481/482 | S25W/K30H/A102T | + | | + |
| 483/484 | W117M | | | + |
| 485/486 | W117M/G119E | ++ | | +++ |
| 487/488 | W117M/G119E/G296W | ++ | | +++ |

Levels of increased activity were determined relative to the reference polypeptide of SEQ ID NO: 396 and defined as follows: “+” >1, “++” >1.2, “+++” >2

### Example 11

### Improvements Over SEQ ID NO: 436 in RNA Ligase 2 Activity

[0416] The engineered RNA ligase of SEQ ID NO: 436 was selected as the parent enzyme after screening variants as described in Example 9 above. Libraries of engineered genes were produced using known techniques (e.g., saturation mutagenesis, recombination of previously identified beneficial mutations, etc.). The polypeptides encoded by each gene were produced in HTP as described in Example 1 and the cell paste was generated as described in Example 2.

[0417] To prepare cells for lysis, 600 μL of 0.1 mg/mL lysozyme in 50 mM TRIS-HCl buffer at pH 7.5 was added to the cell paste of each sample. After thorough resuspension, the cells were incubated at 43° C. for 1 hour in a PCR thermocycler. The samples were then centrifuged for 10 minutes at 4,000 rpm and 4° C. and the clarified supernatants were used in subsequent biocatalytic reactions.

[0418] To screen the enzyme variants, lysate 2% (v/v) final concentration transferred into 96-well shallow well plates containing 20 g/L of the shortmer mix A (Table 2.1) and 26.6% (v/v) reaction buffer. The reactions were incubated for 4 hours at 33° C. in a Multitron (Infors) with shaking at 700 rpm. Afterwards, EDTA was added to each reaction to a final concentration of 10 mM and the samples analyzed via HPLC to quantify the remaining fragment concentrations and product yields.

[0419] The conversion results are shown in Table 9. Activity relative to SEQ ID NO: 436 was calculated as the percent conversion formed by the variant over percent conversion of SEQ ID NO: 436.

TABLE 9
RNA ligase activity for total A conversion,
antisense A strand conversion, and sense A
strand conversion relative to SEQ ID NO: 436

| | | | Pos Control | |
|---|---|---|---|---|
| | Amino Acid | | FIOP Anti | Pos Control |
| SEQ | Differences | Pos Control | Sense A | FIOP Sense |
| ID NO: | (Relative to | FIOP Total A | Strand | A Strand |
| (nt/aa) | SEQ ID NO: 436) | Conversion | Conversion | Conversion |
| 489/490 | D332R | + | + | ++ |
| 491/492 | F156C | ++ | ++ | ++ |
| 493/494 | N177L | ++ | ++ | ++ |
| 495/496 | V333A | ++ | ++ | ++ |
| 497/498 | F96A | ++ | ++ | ++ |
| 499/500 | G11P | ++ | ++ | ++ |
| 501/502 | F156Y | ++ | ++ | ++ |
| 503/504 | T189L | ++ | ++ | ++ |
| 505/506 | N177I | ++ | ++ | ++ |
| 507/508 | V327I | ++ | ++ | ++ |
| 509/510 | V333T | ++ | ++ | ++ |
| 511/512 | T189V | ++ | ++ | ++ |
| 513/514 | S25K | ++ | ++ | ++ |
| 515/516 | A73T | ++ | ++ | ++ |
| 517/518 | V333S | ++ | ++ | ++ |
| 519/520 | Y98S | ++ | ++ | ++ |
| 521/522 | E335L | ++ | | ++ |
| 523/524 | V327R | ++ | ++ | |
| 525/526 | K95E | ++ | ++ | ++ |
| 527/528 | A188S | + | + | + |
| 529/530 | Y98E | ++ | ++ | ++ |
| 531/532 | F52L | ++ | + | ++ |
| 533/534 | E335K | ++ | ++ | ++ |

Levels of increased activity were determined relative to the reference polypeptide of SEQ ID NO: 436 and defined as follows: “+” >1, “++” >1.2

### Example 12

### Improvements Over SEQ ID NO: 520 in RNA Ligase 2 Activity

[0420] The engineered RNA ligase of SEQ ID NO: 520 was selected as the parent enzyme after screening variants as described in Example 11 above. Libraries of engineered genes were produced using known techniques (e.g., saturation mutagenesis, recombination of previously identified beneficial mutations, etc.). The polypeptides encoded by each gene were produced in HTP as described in Example 1 and the cell paste was generated as described in Example 2.

[0421] To prepare cells for lysis, 600 μL of 0.1 mg/mL lysozyme in 50 mM TRIS-HCl buffer at pH 7.5 was added to the cell paste of each sample. After thorough resuspension, the cells were incubated at 43° C. for 1 hour in a PCR thermocycler. The samples were then centrifuged for 10 minutes at 4,000 rpm and 4° C. and the clarified supernatants were used in subsequent biocatalytic reactions.

[0422] To screen the enzyme variants, lysate 1% (v/v) final concentration transferred into 96-well shallow well plates containing 20 g/L of the shortmer mix A (Table 2.1) and 26.6% (v/v) reaction buffer. The reactions were incubated for 4 hours at 33° C. in a Multitron (Infors) with shaking at 700 rpm. Afterwards, EDTA was added to each reaction to a final concentration of 10 mM and the samples analyzed via HPLC to quantify the remaining fragment concentrations and product yields.

[0423] The conversion results are shown in Table 10. Activity relative to SEQ ID NO: 520 was calculated as the percent conversion formed by the variant over percent conversion of SEQ ID NO: 520.

TABLE 10
RNA ligase activity for total A conversion, antisense A strand conversion,
and sense A strand conversion relative to SEQ ID NO: 520

| | Amino Acid | | Pos Control | Pos Control |
|---|---|---|---|---|
| | Differences | Pos Control | FIOP Anti | FIOP Sense |
| SEQ ID NO: | (Relative to | FIOP Total A | Sense A Strand | A Strand |
| (nt/aa) | SEQ ID NO: 520) | Conversion | Conversion | Conversion |
| 535/536 | F96S/S98Y/F156C/T189V/E335K | ++++ | ++++ | ++++ |
| 537/538 | A73T/F96S/S98E/T189L/E335K | ++++ | ++++ | ++++ |
| 539/540 | A73T/N177L/T189V | +++ | ++++ | +++ |
| 541/542 | A73T/S98E/N177L/T189V/E335K | +++ | +++ | ++++ |
| 543/544 | S25A/A73T/K95E/F96A/S98E/T189V/ | +++ | +++ | +++ |
| | V327I | | | |
| 545/546 | S25K/S98Y/T189V | +++ | +++ | +++ |
| 547/548 | A73T/K95E/F96S/F156Y/N177L | +++ | +++ | +++ |
| 549/550 | A73T/E335K | +++ | ++ | +++ |
| 551/552 | A73T/F96S/S98Y/F156C/E335K | +++ | ++ | +++ |
| 553/554 | A73T/N177L/T189V/V333T | ++ | ++ | ++ |

Levels of increased activity were determined relative to the reference polypeptide of SEQ ID NO: 520 and defined as follows: “+” >1, “++” >1.2, “+++” >2, “++++” >4

### Example 13

### Improvements Over SEQ ID NO: 552 in RNA Ligase 2 Activity

[0424] SEQ ID NO: 552 was selected as the parent enzyme after screening variants as described in Example 12 above. Libraries of engineered genes were produced using well established techniques (e.g., saturation mutagenesis, recombination of previously identified beneficial mutations). The polypeptides encoded by each gene were produced in HTP as described in Example 1 and the cell paste was generated as described in Example 2.

[0425] To prepare cells for lysis, 600 μL of 0.1 mg/mL lysozyme in 50 mM Tris-HCl buffer at pH 7.5 was added to the cell paste of each sample. After thorough resuspension, the cells were incubated at 43° C. for 1 hour in a PCR thermocycler. The samples were then centrifuged for 10 minutes at 4,000 rpm and 4° C. and the clarified supernatants were used in subsequent biocatalytic reactions.

[0426] The enzyme variants were screened with three shortmer mixes A, B, and C (Table 2.1, Table 11.1, Table 11.2). Screening with shortmer mix A was performed using final lysate concentration of 1% (v/v). Screening with shortmer mix B and shortmer mix C was performed using final lysate concentration of 2% (v/v). To screen the enzyme variants, lysate concentration indicated above was transferred into 96-well shallow well plates containing 20 g/L of a testing shortmer mix and 26.6% (v/v) reaction buffer. The reactions were incubated for 4 hours at 33° C. in a Multitron (Infors) with shaking at 700 rpm. Afterwards, EDTA was added to each reaction to a final concentration of 10 mM and the samples analyzed via HPLC to quantify the remaining fragment concentrations and product yields.

TABLE 11.1

| Oligo No. | Shortmer B mix components |
|---|---|
| 5 | U*-Cf*-A*-Cf-U-Gf-A-G |
| 6 | 5′-p-A-A-U-Af-C-Uf-G-Uf-C-Cf-C-Gf*-U |
| 7 | Tri-NAG*-invAb*-A-C-G-G-G |
| 8 | 5′-p-A-C-A-Gf-Uf-Af-U-U-C-U-C-A-G-U-I- |
| | A*-invAB |

[0427] In the above description of oligonucleotides, “-” represents a phosphate linkage; “*-” represents a phosphorothioate linkage; nucleotide N (e.g., A, G, U, C) represents a 2′-methoxy (2′-O-methyl) modified nucleotide; nucleotide I represents a 2′-methoxy (2′-O-methyl) modified inosine; (Nf represents a 2′-fluoro modified nucleotide; Tri-NAG represents a tri-antennary N-Acetylgalactosamine (GalNAc) ligand; invAb represents an inverted abasic residue (inverted abasic deoxyribonucleotide); and 5′-p represents 5′-phosphate. Further information regarding the full oligonucleotide construct can be found, for example, in U.S. Pat. No. 10,597,657 to Arrowhead Pharmaceuticals, Inc., incorporated by reference herein.

[0428] Oligonucleotide 5 base pairs with oligonucleotide 8, and oligonucleotide 6 base pairs with oligonucleotides 7 and 8. Oligonucleotides 5-8 when hybridized form a nick between the 3′-end of oligonucleotide 5 and 5-end of oligonucleotide 6, and a nick between the 3′-end of oligonucleotide 7 and the 5′-end of oligonucleotide 8. Ligation of oligonucleotides 5 and 6 results in formation of the anti-sense B strand, and ligation of oligonucleotides 7 and 8 results in formation of the sense B strand.

TABLE 11.2

| Oligo No. | Shortmer C mix components |
|---|---|
| 9 | cPrP-U*-Gf*-A*-U-G-U-U-U |
| 10 | 5′-p-G-A-Gf-C-Af-C-Cf-U-A-C-U*-C |
| 11 | Tri-SM-G*A-G-U-A-G-Gf |
| 12 | 5′-p-U-Gf-C-Uf-C-A-A-A-A-C-A-U-C-A*- |
| | invAb |

[0429] In the above description of oligonucleotides, “-” represents a phosphate linkage; “*-” represents a phosphorothioate linkage; nucleotide N (e.g., A, G, U, C) represents a 2′-methoxy (2′-O-methyl) modified nucleotide; Nf represents a 2′-fluoro modified nucleotide; Tri-SM represents a tri-antennary small molecule ligand having affinity for integrin alpha-v-beta-6; cPrP represents cyclopropyl phosphonate invAb represents an inverted abasic residue (inverted abasic deoxyribonucleotide); and 5′-p represents 5′-phosphate. Further information regarding the full oligonucleotide construct can be found, for example, in International Patent Application Publication No. WO 2022/216920 to Arrowhead Pharmaceuticals, Inc., incorporated by reference herein.

[0430] Oligonucleotide 9 base pairs with oligonucleotide 12, and oligonucleotide 10 base pairs with oligonucleotides 11 and 12. Oligonucleotides 9-12 when hybridized form a nick between the 3′-end of oligonucleotide 9 and 5-end of oligonucleotide 10, and a nick between the 3′-end of oligonucleotide 11 and the 5′-end of oligonucleotide 12. Ligation of oligonucleotides 9 and 10 results in formation of the anti sense C strand, and ligation of oligonucleotides 11 and 12 results in formation of the sense C strand.

[0431] Percent conversions were calculated as in the following using analytical method in Example 15 and the results are shown in Tables 11.3 to 11.4:

$$Antisense B or C strand conversion : \% conversion = \frac{Area under the curve for anti sense B or C strand product}{Total area under the curve for all products and substrates} * 100 \%$$

$$Sense B or C strand conversion : \% conversion = \frac{Area under the curve for sense B or C strand product}{Total area under the curve for all products and substrates} * 100 \%$$

$$Total B conversion : Sum of antisense B or C strand conversion and sense B or C strand conversion .$$

[0432] The conversion results are shown in Table 11.3 and 11.4. Activity relative to SEQ ID NO: 552 was calculated as the percent conversion formed by the variant over percent conversion of SEQ ID NO: 552.

TABLE 11.3
RNA ligase activity for total A conversion,
antisense A strand conversion, and sense A
strand conversion relative to SEQ ID NO: 552

| | | | Pos Control | Pos Control |
|---|---|---|---|---|
| | Amino Acid | Pos Control | FIOP Anti | FIOP Total |
| SEQ | Differences | FIOP Sense | Sense | Conversion |
| ID NO: | (Relative to | A Strand | A Strand | relative to SEQ |
| (nt/aa) | SEQ ID NO: 552) | Conversion | Conversion | ID NO: 552 |
| 555/556 | E292Y | ++ | + | ++ |
| 557/558 | Y147L | ++ | + | + |
| 559/560 | P255S | ++ | ++ | ++ |
| 561/562 | M295R | ++ | + | ++ |
| 563/564 | T75L | + | + | + |

Levels of increased activity were determined for RNA ligase 2 activity relative to SEQ ID NO: 552 and are defined as follows: “+” >1.2, “++” >2.0.

TABLE 11.4
RNA ligase 2 activity relative to SEQ ID NO: 552

| | | | | Set A Pos | | | Set B Pos | | | Set C Pos |
|---|---|---|---|---|---|---|---|---|---|---|
| | Amino Acid | Set A Pos | Set A Pos | Control | Set B Pos | Set B Pos | Control | Set C Pos | Set C Pos | Control |
| | Differences | Control | Control | FIOP | Control | Control | FIOP | Control | Control | FIOP |
| SEQ ID NO: | (Relative to | FIOP SS | FIOP AS | Total | FIOP SS | FIOP AS | Total | FIOP SS | FIOP AS | Total |
| (nt/aa) | SEQ ID NO: 552) | Conver.¹ | Conver.¹ | Conver.¹ | Conver.¹ | Conver.¹ | Conver.¹ | Conver.¹ | Conver.¹ | Conver.¹ |
| 565/566 | Q300E | ++ | ++ | ++ | | | | + | + | + |
| 567/568 | V333E | + | ++ | ++ | ++ | + | + | + | + | + |
| 569/570 | C200S | ++ | ++ | ++ | + | + | + | + | + | + |
| 571/572 | K289S | | + | + | ++ | | + | + | + | + |
| 573/574 | K95V | + | ++ | + | + | + | + | + | + | + |
| 575/576 | K289A | + | ++ | ++ | ++ | | + | ++ | ++ | ++ |
| 577/578 | K289T | + | ++ | + | ++ | + | + | ++ | + | ++ |
| 579/580 | T168A | + | ++ | + | | | | + | + | + |
| 581/582 | K289H | + | ++ | ++ | ++ | | + | ++ | + | + |
| 583/584 | C200T | ++ | ++ | ++ | + | + | + | + | + | + |

¹Conversion relative to SEQ ID NO: 552.
Levels of increased activity were determined for RNA ligase 2 activity relative to SEQ ID NO: 552 and are defined as follows: “+” >1.0, “++” >1.2.

### Example 14

### Improvements Over SEQ ID NO: 582 in RNA Ligase 2 Activity

[0433] The RNA ligase of SEQ ID NO: 582 was selected as the parent enzyme after screening variants as described in Example 13 above. Libraries of engineered genes were produced using well established techniques (e.g., saturation mutagenesis, recombination of previously identified beneficial mutations). The polypeptides encoded by each gene were produced in HTP as described in Example 1 and the cell paste was generated as described in Example 2.

[0434] To prepare cells for lysis, 600 μL of 0.1 mg/mL lysozyme in 50 mM Tris-HCl buffer at pH 7.5 was added to the cell paste of each sample. After thorough resuspension, the cells were incubated at 43° C. for 1 hour in a PCR thermocycler. The samples were then centrifuged for 10 minutes at 4,000 rpm and 4° C. and the clarified supernatants were used in subsequent biocatalytic reactions.

[0435] The enzyme variants were screened with three shortmer mixes A, B, and C (Tables 2.1, 11.1 and 11.2). Screening with shortmer mix A and shortmer mix C was performed using final lysate concentration of 0.625% (v/v). Screening with shortmer mix B was performed using final lysate concentration of 2% (v/v). To screen the enzyme variants, lysate concentration indicated above was transferred into 96-well shallow well plates containing 20 g/L of a testing shortmer mix and 26.6% (v/v) reaction buffer. The reactions were incubated for 4 hours at 33° C. in a Multitron (Infors) with shaking at 700 rpm. Afterwards, EDTA was added to each reaction to a final concentration of 10 mM and the samples analyzed via HPLC to quantify the remaining fragment concentrations and product yields.

[0436] Percent conversions were calculated as described in Example 13 the following using analytical method in Example 15.

[0437] The conversion results are shown in Table 12. Activity relative to SEQ ID NO: 582 was calculated as the percent conversion formed by the variant over percent conversion of SEQ ID NO: 582.

TABLE 12
RNA ligase activity relative to SEQ ID NO: 582

| | | | | Set A Pos | | | Set B Pos | | | Set C Pos |
|---|---|---|---|---|---|---|---|---|---|---|
| | Amino Acid | Set A Pos | Set A Pos | Control | Set B Pos | Set B Pos | Control | Set C Pos | Set C Pos | Control |
| SEQ | Differences | Control | Control | FIOP | Control | Control | FIOP | Control | Control | FIOP |
| ID NO: | (Relative to | FIOP SS | FIOP AS | Total | FIOP SS | FIOP AS | Total | FIOP SS | FIOP AS | Total |
| (nt/aa) | SEQ ID NO: 582) | Conver.¹ | Conver.¹ | Conver.¹ | Conver.¹ | Conver.¹ | Conver.¹ | Conver.¹ | Conver.¹ | Conver.¹ |
| 585/586 | K95V/C156Y/A337G | +++ | +++ | +++ | ++ | +++ | ++ | +++ | +++ | +++ |
| 587/588 | T189V/C200T/V271I | ++ | ++ | ++ | + | + | + | + | + | + |
| 589/590 | C200S/V271I/H289A/A337G | ++ | ++ | ++ | + | ++ | + | + | + | + |
| 591/592 | C200T/V271I/H289A | +++ | ++ | +++ | ++ | ++ | ++ | ++ | ++ | ++ |
| 593/594 | T189V/C200S | ++ | ++ | ++ | + | + | + | + | + | + |
| 595/596 | C156Y/C200S/H289T | ++ | ++ | ++ | + | ++ | + | ++ | ++ | ++ |
| 597/598 | C156F/T168A/T189V/V271I/ | ++ | + | ++ | + | + | + | + | + | + |
| | Q300E | | | | | | | | | |
| 599/600 | C156Y/T189V/C200T/H289A | +++ | ++ | +++ | ++ | ++ | ++ | ++ | ++ | ++ |
| 601/602 | C156F/T168A/H289K | ++ | ++ | ++ | + | | + | + | + | + |
| 603/604 | K95V/C156Y/V271I/H289K | ++ | ++ | ++ | + | | + | + | + | + |
| 605/606 | C156F/V333E | +++ | +++ | +++ | + | + | + | ++ | ++ | ++ |
| 607/608 | K95V/C200T/H289K/A337G | ++ | ++ | ++ | ++ | + | + | ++ | + | + |
| 609/610 | T168A/C200S/H289A | ++ | ++ | ++ | + | + | + | + | + | + |
| 611/612 | T189V/C200T/H289K | ++ | ++ | ++ | ++ | | + | + | + | + |
| 613/614 | V333E/A337G | +++ | ++ | ++ | + | + | + | + | + | + |
| 615/616 | V103I/C156F/V271I | + | + | + | + | + | + | + | + | + |
| 617/618 | K95V/C156F/C200S/Q300E/ | ++ | ++ | ++ | + | + | + | + | + | + |
| | V333E | | | | | | | | | |
| 619/620 | C156F/V271I/H289T/V333E | +++ | ++ | +++ | + | ++ | + | ++ | ++ | ++ |
| 621/622 | K95V/C156F/V271I | +++ | +++ | +++ | ++ | ++ | ++ | ++ | ++ | ++ |
| 623/624 | K95V/T189V/H289K | + | ++ | ++ | + | | + | + | + | + |
| 625/626 | K95V/C156Y/T168A/T189V/ | +++ | +++ | +++ | ++ | ++ | ++ | ++ | ++ | ++ |
| | V271I/H289T/Q300E | | | | | | | | | |
| 627/628 | T189V/V271I/H289A | ++ | + | ++ | + | + | + | + | + | + |
| 629/630 | K95V/T168A/V271I/Q300E | ++ | ++ | ++ | + | + | + | + | + | + |
| 631/632 | C156Y/T189V/H289A/A337G | ++ | ++ | ++ | ++ | ++ | ++ | ++ | ++ | ++ |
| 633/634 | C200S/V271I | ++ | ++ | ++ | + | + | + | + | + | + |
| 635/636 | C156F/T189V/V333E | ++ | ++ | ++ | + | + | + | + | + | + |
| 637/638 | T189V/H289T | +++ | ++ | ++ | ++ | ++ | ++ | ++ | ++ | ++ |
| 639/640 | C156Y/T189V/C200T/Q300E/ | ++ | ++ | ++ | + | + | + | + | + | + |
| | V333E/A337G | | | | | | | | | |
| 641/642 | C156Y/C200T/H289A | ++ | ++ | ++ | + | + | + | + | + | + |
| 643/644 | C156F/T189V/C200S/V271I/ | + | ++ | ++ | + | + | + | + | + | + |
| | H289K/A337G | | | | | | | | | |
| 645/646 | C156Y/C200S/V271I/H289A/ | +++ | ++ | ++ | + | ++ | + | + | + | + |
| | V333E/A337G | | | | | | | | | |
| 647/648 | T168A/V271I/Q300E | ++ | + | ++ | + | + | + | + | + | + |
| 649/650 | H289T/A337G | ++ | ++ | ++ | + | + | + | + | + | + |
| 651/652 | C156Y/T168A/A337G | ++ | + | + | + | + | + | + | + | + |
| 653/654 | C156F/T168A/T189V/H289T | + | + | + | + | + | + | + | + | + |
| 655/656 | C156Y/V271I/H289T | + | + | + | + | + | + | + | + | + |
| 657/658 | T189V/Q300E | ++ | + | + | + | + | + | + | + | + |
| 659/660 | C156Y/H289T/Q300E/A337G | ++ | + | + | + | + | + | + | + | + |
| 661/662 | T168A/T189V/H289T | + | + | + | + | + | + | + | + | + |
| 663/664 | K95V/C156F/T168A/Q300E | ++ | ++ | ++ | + | ++ | ++ | ++ | ++ | ++ |
| 665/666 | C156Y/C200S/Q300E/A337G | + | + | + | + | + | + | + | + | + |
| 667/668 | H289A/V333E/A337G | + | + | + | + | + | + | + | + | + |
| 669/670 | K95V/T189V/C200T/Q300E/ | + | + | + | + | + | + | + | + | + |
| | A337G | | | | | | | | | |
| 671/672 | K95V/C156F/T189V/C200T/ | ++ | ++ | ++ | ++ | +++ | ++ | ++ | ++ | ++ |
| | V271I/V333E | | | | | | | | | |
| 673/674 | C200S/V271I/H289A/Q300E | + | + | + | + | + | + | + | + | + |
| 675/676 | H289A/V333E | ++ | ++ | ++ | + | + | + | + | + | + |
| 677/678 | T189V/V271I/Q300E | + | + | + | + | + | + | + | + | + |
| 679/680 | K95V/Q300E | + | + | + | + | + | + | + | + | + |
| 681/682 | K95V/T189V/V333E/A337G | + | + | + | + | + | + | + | + | + |
| 683/684 | K95V/T189V/V271I/Q300E | + | + | + | + | + | + | + | + | + |
| 685/686 | K95V/T189V/C200S/H289A | +++ | ++ | +++ | ++ | ++ | ++ | ++ | ++ | ++ |
| 687/688 | T168A | ++ | ++ | ++ | + | ++ | + | ++ | ++ | ++ |
| 689/690 | C156Y/C200S/V271I/H289K/ | ++ | ++ | ++ | + | ++ | + | ++ | ++ | ++ |
| | A337G | | | | | | | | | |
| 691/692 | K95V/T168A/H289T | ++ | + | ++ | + | + | + | + | + | + |
| 693/694 | C156F/H289A | ++ | ++ | ++ | + | ++ | + | ++ | ++ | ++ |
| 695/696 | K95V/C156Y/T189V/V271I/ | + | + | + | + | + | + | + | + | + |
| | H289K | | | | | | | | | |
| 697/698 | C156F/T168A/T189V/C200S/ | +++ | +++ | +++ | + | ++ | + | ++ | ++ | ++ |
| | H289A/V333E | | | | | | | | | |
| 699/700 | C156F/Q300E/V333E/A337G | ++ | ++ | ++ | + | ++ | + | ++ | + | ++ |
| 701/702 | K95V/C156F/T189V/C200S/ | + | + | + | + | ++ | + | + | + | + |
| | V271I/A337G | | | | | | | | | |
| 703/704 | C156F/T189V/C200T/H289K | ++ | ++ | ++ | + | + | + | ++ | + | ++ |
| 705/706 | C156Y/H289T | +++ | ++ | ++ | + | ++ | + | ++ | ++ | ++ |
| 707/708 | V271I | ++ | ++ | ++ | + | ++ | + | ++ | ++ | ++ |
| 709/710 | C156Y/V271I | ++ | ++ | ++ | + | ++ | + | ++ | ++ | ++ |
| 711/712 | C156F/V271I/Q300E/V333E | +++ | ++ | +++ | + | ++ | + | ++ | + | ++ |
| 713/714 | K95V/T168A/C200S | ++ | ++ | ++ | + | + | + | + | + | + |
| 715/716 | T189V/C200S/H289A | + | + | + | + | + | + | + | + | + |
| 717/718 | T168A/V271I | ++ | ++ | ++ | + | ++ | ++ | ++ | ++ | ++ |
| 719/720 | K95V/C200T/V333E | +++ | ++ | +++ | + | ++ | + | ++ | ++ | |
| 721/722 | T189V/C200S/V271I/H289A/ | +++ | +++ | +++ | ++ | +++ | ++ | +++ | ++ | +++ |
| | V333E | | | | | | | | | |
| 723/724 | K95V/T168A/T189V/V333E/ | ++ | ++ | ++ | + | + | + | + | + | + |
| | A337G | | | | | | | | | |
| 725/726 | T189V | ++ | ++ | ++ | + | + | + | ++ | + | + |
| 727/728 | T189V/V333E/A337G | +++ | ++ | ++ | + | ++ | + | ++ | ++ | ++ |
| 729/730 | C156F/T189V/V271I/H289A/ | +++ | ++ | +++ | + | ++ | + | ++ | ++ | ++ |
| | V333E | | | | | | | | | |
| 731/732 | H289A | ++ | ++ | ++ | + | + | + | + | + | + |
| 733/734 | K95V/C156F/C200T/V271I/ | +++ | +++ | +++ | ++ | +++ | ++ | +++ | ++ | ++ |
| | H289K | | | | | | | | | |
| 735/736 | H289A/Q300E/V333E | +++ | +++ | +++ | + | ++ | + | ++ | ++ | ++ |
| 737/738 | K95V/T189V/H289A/A337G | +++ | ++ | ++ | + | ++ | ++ | ++ | ++ | ++ |
| 739/740 | K95V/C156F/T168A/T189V/ | +++ | +++ | +++ | ++ | +++ | ++ | +++ | +++ | +++ |
| | H289A | | | | | | | | | |
| 741/742 | V271I/H289T | +++ | ++ | ++ | + | ++ | ++ | ++ | ++ | ++ |
| 743/744 | V333E | +++ | +++ | +++ | + | + | + | ++ | ++ | ++ |
| 745/746 | T168A/A337G | ++ | ++ | ++ | + | + | + | + | + | + |
| 747/748 | C156Y/H289A | ++ | ++ | ++ | + | ++ | + | + | + | + |
| 749/750 | C156Y/T189V/V271I/H289K | + | ++ | ++ | + | + | + | + | + | + |
| 751/752 | K95V/C156F/T189V/A337G | ++ | ++ | ++ | ++ | ++ | ++ | ++ | ++ | ++ |
| 753/754 | T189V/H289K | ++ | ++ | ++ | ++ | + | + | ++ | + | ++ |
| 755/756 | T189V/H289A | +++ | +++ | +++ | ++ | ++ | ++ | ++ | ++ | ++ |
| 757/758 | C156Y/T189V/V271I/Q300E | ++ | + | ++ | + | ++ | + | ++ | + | + |
| 759/760 | C156F/T168A/H289A/V333E | +++ | +++ | +++ | + | ++ | + | ++ | ++ | ++ |
| 761/762 | T168A/T189V/H289K/V333E | ++ | ++ | ++ | ++ | ++ | ++ | + | + | + |
| 763/764 | K95V/V333E | ++ | ++ | ++ | + | ++ | + | + | + | + |
| 765/766 | V333E/S343P | ++ | ++ | ++ | ++ | ++ | ++ | ++ | ++ | ++ |
| 767/768 | C156F/T189V/H289A | ++ | + | ++ | + | ++ | ++ | + | + | + |
| 769/770 | K95V/H289A/Q300E | ++ | + | ++ | + | + | + | + | + | + |
| 771/772 | K95V/C156Y/T189V/C200S/ | ++ | + | ++ | + | + | + | + | + | + |
| | Q300E/V333E/A337G | | | | | | | | | |
| 773/774 | T189V/C200T/V271I/H289K/ | + | + | + | ++ | ++ | ++ | + | + | + |
| | A337G | | | | | | | | | |
| 775/776 | K95V/C156Y/T168A/T189V/ | + | ++ | ++ | ++ | ++ | ++ | ++ | + | + |
| | H289K/A337G | | | | | | | | | |
| 777/778 | C156F/H289K | + | ++ | ++ | ++ | +++ | ++ | ++ | + | ++ |
| 779/780 | K95V/H289A | + | + | + | + | + | + | + | + | + |
| 781/782 | C156Y/T168A/H289A | +++ | ++ | +++ | ++ | +++ | ++ | ++ | ++ | ++ |
| 783/784 | C156F/H289K/V333E/A337G | + | ++ | + | + | + | + | + | + | + |
| 785/786 | C156F/H289K/A337G | + | ++ | + | ++ | ++ | ++ | + | + | + |
| 787/788 | H289A/A337G | ++ | ++ | ++ | ++ | ++ | ++ | ++ | ++ | ++ |
| 789/790 | A337G | + | + | + | + | + | + | + | + | + |
| 791/792 | T168A/H289A | ++ | ++ | ++ | ++ | ++ | ++ | ++ | ++ | ++ |
| 793/794 | K95V/C156F/Q300E | ++ | ++ | ++ | ++ | +++ | ++ | ++ | + | + |
| 795/796 | K95V/C156Y/H289K | + | + | + | + | + | + | + | + | + |
| 797/798 | K95V/T189V/V271I/V333E/ | ++ | + | + | + | ++ | + | + | + | + |
| | A337G | | | | | | | | | |
| 799/800 | K95V/T168A/Q300E | ++ | + | ++ | + | ++ | + | + | + | + |
| 801/802 | K95V/C156Y/T168A/V271I/ | ++ | + | ++ | + | ++ | + | + | + | + |
| | V333E/A337G | | | | | | | | | |
| 803/804 | K95V/T189V/H289A/V333E/ | ++ | ++ | ++ | + | ++ | + | + | + | + |
| | A337G | | | | | | | | | |
| 805/806 | C156F/T168A/C200S/H289A/ | ++ | | + | + | ++ | ++ | + | + | + |
| | L334S | | | | | | | | | |
| 807/808 | K95V/C156F/T168A/T189V/ | + | | + | ++ | +++ | ++ | + | + | + |
| | V271I/H289T | | | | | | | | | |
| 809/810 | C156Y/T189V/C200T/H289T/ | +++ | ++ | ++ | ++ | +++ | ++ | ++ | ++ | ++ |
| | A337G | | | | | | | | | |
| 811/812 | C156F/V271I | ++ | + | + | + | ++ | ++ | + | + | + |
| 813/814 | H289K/Q300E/V333E | ++ | ++ | ++ | ++ | ++ | ++ | ++ | + | ++ |
| 815/816 | K95V/C156Y/V271I | +++ | ++ | ++ | ++ | +++ | ++ | +++ | ++ | ++ |
| 817/818 | C200S/H289A | ++ | + | ++ | + | ++ | + | + | + | + |
| 819/820 | C200S/H289K/V333E/A337G | + | ++ | ++ | + | + | + | + | + | + |
| 821/822 | K95V/T168A/T189V/C200T/ | ++ | + | + | + | ++ | + | + | + | + |
| | H289A | | | | | | | | | |
| 823/824 | C156Y/V271I/H289T/V333E | +++ | ++ | +++ | ++ | +++ | ++ | ++ | ++ | ++ |
| 825/826 | T168A/C200S | + | + | + | + | ++ | + | + | + | + |
| 827/828 | C156F/T168A/V271I/H289A | ++ | + | ++ | ++ | ++ | ++ | ++ | ++ | ++ |
| 829/830 | T189L/V206R/H289S | + | + | + | + | + | + | + | + | + |
| 831/832 | C156F/C200S/H289S/V333E/ | ++ | + | ++ | + | + | + | + | + | + |
| | K335E | | | | | | | | | |
| 833/834 | C156F/C200S/V333E | ++ | ++ | ++ | ++ | ++ | ++ | ++ | ++ | ++ |
| 835-836 | T189V/C200S/H289K/V333E | ++ | ++ | ++ | + | + | + | ++ | + | + |
| 837/838 | T189L/H289K/K335E | ++ | ++ | ++ | + | + | + | + | + | + |
| 839/840 | T189V/V254G/H289S/V333E | ++ | ++ | ++ | + | + | + | + | + | + |
| 841/842 | T189L/H289S | ++ | ++ | ++ | + | + | + | + | + | + |
| 843/844 | G167A/T189L/V206R/H289S/ | ++ | + | ++ | + | ++ | + | + | + | + |
| | V333E/K335E | | | | | | | | | |
| 845/846 | C156F/C200S/H289S/V333E | + | + | + | + | + | + | + | + | + |
| 847/848 | T189L/C200S/H289S | + | + | + | + | + | + | + | + | + |
| 849/850 | C156Y/C200S/H289K/K335E | + | + | + | + | + | + | + | + | + |
| 851/852 | C156F/T189L/C200S/H289K | + | ++ | + | ++ | + | + | + | + | + |
| 853/854 | C156Y/T189L/H289K/K335E | ++ | + | ++ | + | + | + | + | + | + |
| 855/856 | C156Y/C200S/H289K/V333E | ++ | ++ | ++ | + | + | + | ++ | + | + |
| 857/858 | K335E | ++ | + | ++ | + | ++ | + | + | + | + |
| 859/860 | C156F/C200S/H289K/V333E | + | ++ | ++ | + | | + | + | + | + |
| 861/862 | C156F/G167A/T189V/H289T | ++ | ++ | ++ | + | + | + | ++ | + | + |
| 863/864 | C156Y/T189L/C200S/H289S/ | ++ | + | ++ | + | ++ | + | + | + | + |
| | K335E | | | | | | | | | |
| 865/866 | C200S/H289S/V333E/K335E | ++ | + | ++ | + | ++ | + | + | + | + |
| 867/868 | C156Y/T189V/C200S/H289T/ | ++ | ++ | ++ | + | ++ | + | ++ | + | ++ |
| | V333E | | | | | | | | | |
| 869/870 | V254G/V333E/K335E | ++ | + | ++ | + | + | + | + | + | + |
| 871/872 | T189L/V254G/V333E/K335E | ++ | + | ++ | + | ++ | + | + | + | + |
| 873/874 | H289S | ++ | ++ | ++ | ++ | ++ | ++ | ++ | ++ | ++ |
| 875/876 | T189V/H289S | ++ | ++ | ++ | + | ++ | ++ | ++ | + | ++ |
| 877/878 | T189V/K335E | ++ | + | ++ | + | + | + | + | + | + |
| 879/880 | C156F/H289T | ++ | ++ | ++ | + | + | + | + | + | + |
| 881/882 | C156F/T189V/V254G/H289S | ++ | ++ | ++ | + | ++ | + | + | + | + |
| 883/884 | C156Y/H289K/V333E | ++ | ++ | ++ | ++ | + | + | ++ | + | + |
| 885/886 | H289S/K335E | +++ | ++ | ++ | + | ++ | ++ | ++ | ++ | ++ |
| 887/888 | T189L/C200S/V254G/H289S/ | + | ++ | + | + | + | + | + | + | + |
| | V333E | | | | | | | | | |
| 889/890 | C156F/T189L/H289S/V333E | ++ | + | + | + | + | + | + | + | + |
| 891/892 | C156Y/T189V/H289S/K335E | ++ | + | + | + | + | + | + | + | + |
| 893/894 | S25A/C156Y/T189L/H289S | ++ | + | + | + | + | + | + | + | + |
| 895/896 | C156Y/T189V/V206R/H289K/ | ++ | ++ | ++ | + | + | + | + | + | + |
| | V333E/K335E | | | | | | | | | |
| 897/898 | H289S/V333E/K335E | ++ | + | ++ | + | + | + | + | + | + |
| 899/900 | T189V/C200S/H289S | + | + | + | + | + | + | + | + | + |
| 901/902 | C156F/V254G/H289K/V333E | ++ | ++ | ++ | + | + | + | + | + | + |
| 903/904 | C156Y/H289T/V333E/K335E | +++ | + | ++ | + | + | + | + | + | + |
| 905/906 | V254G/H289T | ++ | + | + | + | ++ | + | + | + | + |
| 907/908 | C200S/H289T/V333E | +++ | ++ | +++ | + | ++ | ++ | ++ | ++ | ++ |
| 909/910 | C156Y/T189V/C200S | + | + | + | + | + | + | + | + | + |
| 911/912 | C156Y/V254G/V333E/K335E | ++ | + | ++ | | + | + | + | + | + |
| 913/914 | C156F | ++ | ++ | ++ | + | ++ | + | + | + | + |
| 915/916 | V254G/H289K/K335E | + | + | + | + | + | + | + | + | + |
| 917/918 | C200S/H289T | ++ | + | ++ | + | + | + | + | + | + |
| 919/920 | C200S/H289S | ++ | + | ++ | + | + | + | + | + | + |
| 921/922 | C156Y/V206R/H289S | ++ | + | + | + | + | + | + | + | + |
| 923/924 | C156F/H289S/K335E | ++ | | + | + | ++ | + | + | + | + |
| 925/926 | V206R/H289T/V333E/K335E | +++ | + | ++ | + | + | + | + | + | + |
| 927/928 | C156F/T189V/V254G/H289K/ | + | ++ | ++ | + | + | + | + | + | + |
| | V333E | | | | | | | | | |
| 929/930 | C156F/V254G/H289T | + | + | + | + | + | + | + | + | + |
| 931/932 | C200S/H289T/K335E | ++ | + | ++ | + | ++ | + | + | + | + |
| 933/934 | C156Y/T189V/V206R/H289S | ++ | + | + | + | + | + | + | + | + |
| 935/936 | C156Y/T189V/C200S/V206R/ | ++ | ++ | ++ | + | + | + | + | + | + |
| | V254G/H289T/V333E | | | | | | | | | |
| 937/938 | C156Y/V333E | ++ | ++ | ++ | + | + | + | + | + | + |
| 939/940 | C156Y/T189L/V254G/H289T/ | ++ | ++ | ++ | + | ++ | + | + | + | + |
| | V333E | | | | | | | | | |
| 941/942 | S25A/V254G/V333E | ++ | ++ | ++ | + | + | + | + | + | + |
| 943/944 | T189L/H289S/V333E/K335E | +++ | ++ | +++ | + | ++ | + | ++ | ++ | ++ |
| 945/946 | C200S/H289K/K335E | ++ | + | + | + | + | + | + | + | + |
| 947/948 | C156Y/T189V/H289S | ++ | ++ | ++ | + | ++ | + | + | + | + |
| 949/950 | C156F/T189L/C200S/H289K/ | +++ | ++ | ++ | + | + | + | + | + | + |
| | V333E/K335E | | | | | | | | | |
| 951/952 | H289T | ++ | + | ++ | + | + | + | + | + | + |
| 953/954 | C156F/C200S/H289T/K335E | ++ | | + | + | ++ | + | + | + | + |
| 955/956 | V254G/H289S/V333E | ++ | ++ | ++ | + | ++ | + | + | + | + |
| 957/958 | C156F/C200S/V333E/K335E | ++ | + | ++ | | + | + | + | + | + |

¹Conversion relative to SEQ ID NO: 582.
Levels of increased activity were determined for RNA ligase 2 activity relative to SEQ ID NO: 582 and are defined as follows: “+” >1.2, “++” >1.8, “+++” >3.0.

### Example 15

### Analytical Detection of RNA Oligomers by HPLC-UV

[0438] Data described in Examples 4-12 was collected using the analytical method provided in Table 11. The method provided herein finds use in analyzing the variants produced using the present invention. However, it is not intended that present invention be limited to the methods described herein, as there are other suitable methods known in the art that are applicable to the analysis of the variants provided herein and/or produced using the methods provided herein.

TABLE 11
HPLC analytical method

| Instrument | Agilent 1290 - HPLC | | |
|---|---|---|---|
| Column | DNAPac PA200, 4 × 250 mm (p/n 063000) | | |
| Mobile | A: 10 mM NaHCO₃ (pH 11.3), 50 mM NaBr, 45% MeCN | | |
| Phase | B: 10 mM NaHCO₃ (pH 11.3), 650 mM NaBr, 45% MeCN | | |
| Gradient | Time (min) | % A | % B |
| | 0.0 | 70 | 30 |
| | 0.5 | 70 | 30 |
| | 3.0 | 30 | 70 |
| | 3.01 | 70 | 30 |
| | 4.0 | 70 | 30 |
| Flow Rate | 1.0 mL/min | | |
| Run Time | 4.0 min | | |
| | | Retention | |
| | Compound | time (min) | |
| Retention | ATP | 1.1 | |
| times | SS10 | 1.4 | |
| | SS14 + AS14 + AS7 | 2.6-3.0 | |
| | SS FLP | 3.1 | |
| | AS FLP | 3.65 | |

| | |
|---|---|
| Column | 50° C. |
| Temperature | |
| Injection | 10 μL |
| Volume | |
| Detection | UV 260 nm |

[0439] While the invention has been described with reference to the specific embodiments, various changes can be made and equivalents can be substituted to adapt to a particular situation, material, composition of matter, process, process step or steps, thereby achieving benefits of the invention without departing from the scope of what is claimed.

[0440] For all purposes, each and every publication and patent document cited in this disclosure is incorporated herein by reference as if each such publication or document was specifically and individually indicated to be incorporated herein by reference. Citation of publications and patent documents is not intended as an indication that any such document is pertinent prior art, nor does it constitute an admission as to its contents or date.

1. An engineered RNA ligase comprising an amino acid sequence having at least 70%, 75%, 80%, 81%, 82%, 83%, 84%, 85%, 86%, 87%, 88%, 89%, 90%, 91%, 92%, 93%, 94%, 95%, 96%, 97%, 98%, 99%, or more sequence identity to a reference sequence corresponding to residues 12 to 343 of an even numbered SEQ ID NO. of SEQ ID NOs: 2-220, 224-252, and 270-958, or to a reference sequence corresponding to an even numbered SEQ ID NO. of SEQ ID NOs: 2-220, 224-252, and 270-958, wherein the amino acid sequence comprises one or more substitutions relative to the reference sequence corresponding to residues 12 to 343 of SEQ ID NO: 2, 4, 106, 218, 286, 396, 436, 520, 552, or 582, or relative to the reference sequence corresponding to SEQ ID NO: 2, 4, 106, 218, 286, 396, 436, 520, 552, or 582.

2. The engineered RNA ligase of claim 1, comprising an amino acid sequence having at least 70%, 75%, 80%, 81%, 82%, 83%, 84%, 85%, 86%, 87%, 88%, 89%, 90%, 91%, 92%, 93%, 94%, 95%, 96%, 97%, 98%, 99%, or more sequence identity to a reference sequence corresponding to residues 12 to 343 of SEQ ID NO: 2, 4, 106, 218, 286, 396, 436, 520, 552, or 582, or to a reference sequence corresponding to SEQ ID NO: 2, 4, 106, 218, 286, 396, 436, 520, 552, or 582, wherein the amino acid sequence comprises one or more substitutions relative to the reference sequence corresponding to residues 12 to 343 of SEQ ID NO: 2, 4, 106, 218, 286, 396, 436, 520, 552, or 582, or relative to the reference sequence corresponding to SEQ ID NO: 2, 4, 106, 218, 286, 396, 436, 520, 552, or 582.

3. The engineered RNA ligase of claim 1, comprising an amino acid sequence having at least 70%, 75%, 80%, 81%, 82%, 83%, 84%, 85%, 86%, 87%, 88%, 89%, 90%, 91%, 92%, 93%, 94%, 95%, 96%, 97%, 98%, 99%, or more sequence identity to the reference sequence corresponding to residues 12 to 343 of SEQ ID NO: 2, or to the reference sequence corresponding to SEQ ID NO: 2, wherein the amino acid sequence comprises one or more substitutions relative to the reference sequence corresponding to residues 12 to 343 of SEQ ID NO: 2, or relative to the reference sequence corresponding to SEQ ID NO: 2.

4. The engineered RNA ligase of claim 1, comprising an amino acid sequence having at least 70%, 75%, 80%, 81%, 82%, 83%, 84%, 85%, 86%, 87%, 88%, 89%, 90%, 91%, 92%, 93%, 94%, 95%, 96%, 97%, 98%, 99%, or more sequence identity to the reference sequence corresponding to residues 12 to 343 of SEQ ID NO: 4, 106, 218, 286, 396, 436, 520, 552, or 582, or to the reference sequence corresponding to SEQ ID NO: 4, 106, 218, 286, 396, 436, 520, 552, or 582, wherein the amino acid sequence comprises one or more substitutions relative to the reference sequence corresponding to residues 12 to 343 of SEQ ID NO: 2, or relative to the reference sequence corresponding to SEQ ID NO: 2.

5. The engineered RNA ligase of claim 1, comprising an amino acid sequence having at least 70%, 75%, 80%, 81%, 82%, 83%, 84%, 85%, 86%, 87%, 88%, 89%, 90%, 91%, 92%, 93%, 94%, 95%, 96%, 97%, 98%, 99%, or more sequence identity to the reference sequence corresponding to residues 12 to 343 of an even-numbered SEQ ID NO. of SEQ ID NOs: 4-220, 224-252, and 270-958, or to a reference sequence corresponding to an even-numbered SEQ ID NO. of SEQ ID NOs: 4-220, 224-252, and 270-958, wherein the amino acid sequence comprises one or more substitutions relative to the reference sequence corresponding to residues 12 to 343 of SEQ ID NO: 2, or relative to the reference sequence corresponding to SEQ ID NO: 2.

6. The engineered RNA ligase of claim 1, wherein the amino acid sequence of the engineered RNA ligase comprises at least a substitution at amino acid position 11, 12, 14, 16, 17, 23, 25, 26, 30, 32, 33, 38, 40, 52, 57, 60, 68, 69, 71, 73, 75, 79, 82, 83, 92, 93, 95, 96, 98, 100, 101, 102, 103, 111, 114, 117, 118, 119, 120, 135, 136, 141, 142, 145, 147, 156, 167, 168, 170, 171, 174, 177, 179, 183, 184, 185, 188, 189, 190, 191, 192, 193, 196, 200, 202, 205, 206, 207, 209, 221, 229, 254, 255, 259, 270, 271, 287, 288, 289, 292, 295, 296, 300, 307, 320, 327, 332, 333, 334, 335, 336, 337, 339, 342, or 343, or combinations thereof, wherein the amino acid positions are relative to the reference sequence corresponding to residues 12 to 343 of SEQ ID NO: 2, or relative to the reference sequence corresponding to SEQ ID NO: 2.

7. The engineered RNA ligase of claim 1, wherein the amino acid sequence of the engineered RNA ligase comprises at least a substitution or amino acid residue 11P, 12S, 14F/R/T/W, 16R, 17P, 23M, 25A/G/K/L/W, 26F/G/H/L/P/R/S/V, 30A/C/H/R, 32R, 33A/K, 38D, 40E, 52L, 57T, 60R, 68W, 69L, 71K, 73T, 75L/Q/T, 79W, 82I, 83P, 92A/E/G/M/N/S, 93A, 95E/V, 96A/S, 98D/E/P/R/S, 100R, 101G, 102T, 103I, 111L, 114F/G/K/N/P/R/S/V, 117A/C/F/G/H/I/K/L/M/R/S/T/V/W, 118G/L/Q, 119A/E/S/T, 120P, 135Q/T, 136A, 141A/C/E/T, 142H/R, 145D, 147L, 156C/Y, 167A, 168A, 170E, 171E, 174Q, 177I/L, 179F, 183V, 184L/M/P/R, 185H/S, 188S, 189L/V, 190F, 191K, 192V, 193N, 196K, 200S/T, 202W, 205R/V, 206R, 207S/T, 209E/L, 221E, 229A, 254G, 255E/S, 259V, 270A, 271I, 287A, 288A, 289A/H/S/T, 292E/Y, 295R, 296E/L/R/V/W, 300E/K, 307A, 320D/K, 327I/Q/R/W, 332R, 333A/E/S/T, 334S, 335E/H/K/L, 336S, 337G, 339K/R, 342I/T, 343P, 339K/R, or 342I/T, or combinations thereof, wherein the amino acid positions are relative to the reference sequence corresponding to residues 12 to 343 of SEQ ID NO: 2, or relative to the reference sequence corresponding to SEQ ID NO: 2.

8. The engineered RNA ligase of claim 1, wherein the amino acid sequence of the engineered RNA ligase comprises at least a substitution at amino acid position 33, 38, 71, 73, 75, 96, 98, 101, 114, 117, 136, 156, 179, 184, 191, 196, 221, 289, 292, 296, 320, 335, 336, or 339, or combinations thereof, wherein the amino acid positions are relative to the reference sequence corresponding to residues 12 to 343 of SEQ ID NO: 2, or relative to the reference sequence corresponding to SEQ ID NO: 2.

9. The engineered RNA ligase of claim 1, wherein the amino acid sequence of the engineered RNA ligase comprises at least a substitution or amino acid residue 33A/K, 38D, 71K, 73T, 75L/Q/T, 96A/S, 98D/E/P/R/S, 101G, 114F/K/N/P/R/S/V, 117A/C/F/G/H/I/K/L/M/R/S/T/V/W, 136A, 156C/Y, 179F, 184L/M/P/R, 191K, 196K, 221E, 289A/H/S/T, 292E/Y, 296E/L/R/V/W, 320D/K, 335E/H/K/L, 336S, or 339K/R, or combinations thereof, wherein the amino acid positions are relative to the reference sequence corresponding to residues 12 to 343 of SEQ ID NO: 2, or relative to the reference sequence corresponding to SEQ ID NO: 2.

10-18. (canceled)

19. The engineered RNA ligase of claim 1, comprising an amino acid sequence having at least 70%, 75%, 80%, 81%, 82%, 83%, 84%, 85%, 86%, 87%, 88%, 89%, 90%, 91%, 92%, 93%, 94%, 95%, 96%, 97%, 98%, 99%, or more sequence identity to a reference sequence corresponding to residues 12 to 343 of SEQ ID NO: 4, 106, 218, 286, 396, 436, 520, 552, or 582, or to a reference sequence corresponding to SEQ ID NO: 4, 106, 218, 286, 396, 436, 520, 552, or 582, wherein the amino acid sequence comprises one or more substitutions relative to the reference sequence corresponding to residues 12 to 343 of SEQ ID NO: 4, 106, 218, 286, 396, 436, 520, 552, or 582, or relative to the reference sequence corresponding to SEQ ID NO: 4, 106, 218, 286, 396, 436, 520, 552, or 582.

20. The engineered RNA ligase of claim 1, comprising an amino acid sequence having at least 70%, 75%, 80%, 81%, 82%, 83%, 84%, 85%, 86%, 87%, 88%, 89%, 90%, 91%, 92%, 93%, 94%, 95%, 96%, 97%, 98%, 99%, or more sequence identity to a reference sequence corresponding to residues 12 to 343 of an even-numbered SEQ ID NO of SEQ ID NOs: 4-220, 224-252, and 270-958, or to a reference sequence corresponding to an even-numbered SEQ ID NO of SEQ ID NOs: 4-220, 224-252, and 270-958, wherein the amino acid sequence comprises one or more substitutions relative to the reference sequence corresponding to residues 12 to 343 of SEQ ID NO: 4, 106, 218, 286, 396, 436, 520, 552, or 582, or relative to the reference sequence corresponding to SEQ ID NO: 4, 106, 218, 286, 396, 436, 520, 552, or 582.

21. The engineered RNA ligase of claim 19, wherein the amino acid sequence of the engineered RNA ligase comprises at least a substitution at amino acid position 11, 12, 14, 16, 17, 23, 25, 26, 30, 32, 33, 38, 40, 52, 57, 60, 68, 69, 71, 73, 75, 79, 82, 83, 92, 93, 95, 96, 98, 100, 101, 102, 103, 111, 114, 117, 118, 119, 120, 135, 136, 141, 142, 145, 147, 156, 167, 168, 170, 171, 174, 177, 179, 183, 184, 185, 188, 189, 190, 191, 192, 193, 196, 200, 202, 205, 206, 207, 209, 221, 229, 254, 255, 259, 270, 271, 287, 288, 289, 292, 295, 296, 300, 307, 320, 327, 332, 333, 334, 335, 336, 337, 339, 342, or 343, or combinations thereof, wherein the amino acid positions are relative to the reference sequence corresponding to residues 12 to 343 of SEQ ID NO: 4, 106, 218, 286, 396, 436, 520, 552, or 582, or relative to the reference sequence corresponding to SEQ ID NO: 4, 106, 218, 286, 396, 436, 520, 552, or 582.

22. The engineered RNA ligase of claim 19, wherein the amino acid sequence of the engineered RNA ligase comprises at least a substitution or amino acid residue 11P, 12S, 14F/R/T/W, 16R, 17P, 23M, 25A/G/K/L/W, 26F/G/H/L/P/R/S/V, 30A/C/H/R, 32R, 33A/K, 38D, 40E, 52L, 57T, 60R, 68W, 69L, 71K, 73T, 75L/Q/T, 79W, 82I, 83P, 92A/E/G/M/N/S, 93A, 95E/V, 96A/S, 98D/E/P/R/S/Y, 100R, 101G, 102T, 103I, 111L, 114F/G/K/N/P/R/S/V, 117A/C/F/G/H/I/K/L/M/R/S/T/V/W, 118G/L/Q, 119A/E/S/T, 120P, 135Q/T, 136A, 141A/C/E/T, 142H/R, 145D, 147L, 156C/F/Y, 167A, 168A, 170E, 171E, 174Q, 177I/L, 179F/L, 183V, 184L/M/P/R, 185H/S, 188S, 189L/V, 190F, 191K, 192V, 193N, 196K, 200S/T, 202W, 205R/V, 206R, 207S/T, 209E/L, 221E, 229A, 254G, 255E/S, 259V, 270A, 271I, 287A, 288A, 289A/H/K/S/T, 292E/Y, 295R, 296E/L/R/V/W, 300E/K, 307A, 320D/K, 327I/Q/R/W, 332R, 333A/E/S/T, 334S, 335E/H/K/L, 336S, 337G, 339K/R, 342I/T, 343P, 339K/R, or 342I/T, or combinations thereof, wherein the amino acid positions are relative to the reference sequence corresponding to residues 12 to 343 of SEQ ID NO: 4, 106, 218, 286, 396, 436, 520, 552, or 582, or relative to the reference sequence corresponding to SEQ ID NO: 4, 106, 218, 286, 396, 436, 520, 552, or 582.

23. The engineered RNA ligase of claim 19, wherein the amino acid sequence of the engineered RNA ligase comprises at least a substitution at amino acid position 33, 38, 71, 73, 75, 96, 98, 101, 114, 117, 136, 156, 179, 184, 191, 196, 221, 289, 292, 296, 320, 335, 336, or 339, or combinations thereof, wherein the amino acid positions are relative to the reference sequence corresponding to residues 12 to 343 of SEQ ID NO: 4, 106, 218, 286, 396, 436, 520, 552, or 582, or relative to the reference sequence corresponding to SEQ ID NO: 4, 106, 218, 286, 396, 436, 520, 552, or 582.

24. The engineered RNA ligase of claim 19, wherein the amino acid sequence of the engineered RNA ligase comprises at least a substitution or amino acid residue 33A/K, 38D, 71K, 73T, 75L/Q/T, 96A/S, 98D/E/P/R/S/Y, 101G, 114F/G/K/N/P/R/S/V, 117A/C/F/G/H/I/K/L/M/R/S/T/V/W, 136A, 156C/F/Y, 179F/L, 184L/M/P/R, 191K, 196K, 221E, 289A/H/K/S/T, 292E/Y, 296E/L/R/V/W, 320D/K, 335E/H/K/L, 336S, or 339K/R, or combinations thereof, wherein the amino acid positions are relative to the reference sequence corresponding to residues 12 to 343 of SEQ ID NO: 4, 106, 218, 286, 396, 436, 520, 552, or 582, or relative to the reference sequence corresponding to SEQ ID NO: 4, 106, 218, 286, 396, 436, 520, 552, or 582.

25-64. (canceled)

65. The engineered RNA ligase of claim 1, wherein the engineered RNA ligase comprises an amino acid sequence comprising residues 12 to 343 of an even numbered SEQ ID NO. of SEQ ID NOs: 4-220, 224-252, and 270-958, or an amino acid sequence comprising an even numbered SEQ ID NO. of SEQ ID NOs: 4-220, 224-252, and 270-958.

66-68. (canceled)

69. The engineered RNA ligase of claim 1, wherein the engineered RNA ligase has RNA ligase activity and an improved property, wherein the improved property is selected from i) increased activity, ii) increased product yield, iii) increased product yield on polynucleotides with phosphorothioate internucleotide linkages, iv) increased product yield on oligonucleotides with 2′-modifications, and v) increased expression, or any combination of i), ii), iii), iv), and v), compared to a reference RNA ligase having a sequence corresponding to SEQ ID NO: 2, 4, 106, 218, 286, 396, 436, 520, 552, or 582.

70-73. (canceled)

74. A recombinant polynucleotide encoding an engineered RNA ligase of claim 1.

75-79. (canceled)

80. An expression vector comprising a recombinant polynucleotide of claim 74.

81. (canceled)

82. (canceled)

83. A host cell comprising an expression vector of claim 80.

84. (canceled)

85. (canceled)

86. A method of producing an engineered RNA ligase polypeptide in a host cell comprising culturing a host cell of claim 83, under suitable culture conditions such that at least one engineered RNA ligase is produced.

87. (canceled)

88. (canceled)

89. A composition comprising an RNA ligase of claim 1.

90. (canceled)

91. A method of ligating at least a first polynucleotide strand and a second polynucleotide strand, comprising contacting a first polynucleotide strand and a second polynucleotide strand with an engineered RNA ligase of claim 1 in presence of a nucleotide substrate under conditions suitable for ligation of the first polynucleotide strand to the second polynucleotide strand, wherein the first polynucleotide strand comprises a ligatable 5′-end and the second polynucleotide strand comprises a 3′-end ligatable to the 5′-end of the first polynucleotide.

92-108. (canceled)

109. A kit comprising at least an RNA ligase of claim 1.

110. (canceled)

The application's sequence listing, which the Patent Office published only in electronic form, follows.

SEQUENCE LISTING (958 sequences)

SEQ ID NO: 1 - DNA, 1029 bp, synthetic construct
  misc_feature 1..1029: note = his-tagged wild type RNA ligase 2 from Escherichia phage RB69 (Bacteriophage RB69)
  source 1..1029: mol_type = other DNA
atgcatcaccatcaccatcacggtggcagcggtatgtttaagaaatattctagtctggaaaaccattacaatagcaaattcattgagaaactctataccaacggcttaactactggtgtgtgggttgcgcgcgaaaagatccacgggacgaacttttcgctgattatcgagcgtgataatgtaacatgcgccaaacgtacaggcccgattttgcctgcagaagacttctacggttatgaaatcgtcctgaagaaatacgataaagcgattaagacggtgcagaaatttatgtataccgcccgcgcggtttcctaccaagtgttcggagaatttgctggcggcggtatccagaaaggtgtcgattatggcgagaaagacttctatgtgtttgatattctgatcaatacggaatcaggagacaacacgtacctgactgattatgaaatgcaggacttctgtaatgaatttgggtttaagatggcaccaatgcttggtcgcggcacattcgatagcctgattatgattccgaacgatttggattcggttctcgccgcttacaatgcaacggcgagcgaggacctggtagaagcgaacaactgcgtctttgatgccaatgtgatcggtgataacactgctgaaggctatgttcttaaaccgtgtttccccaaatggttaccgaatgggacgcgtgtggcgatcaaatgcaagaactccaaattcagcgagaagaagaaaagtgacaaaccgatcaagacacaagtcccactgacggaaattgataagaatctgctggacgtattggcctgttacgtcactttaaaccgcgtgaacaacgtgatctctaagattggaacagtgacgccgaaagattttggcaaagtaatgggtctgactgttcaggatattctggaagaaacgtcacgtgagggtattgttctgacgacatcggacaatcctaatctcgtcaagaaagaacttgttcgcatggtgcaggatgtattacgtcccgcatggatcgaactggtgtcg

SEQ ID NO: 2 - protein, 343 aa, synthetic construct
  REGION 1..343: note = his-tagged wild type RNA ligase 2 from Escherichia phage RB69 (Bacteriophage RB69)
MHHHHHHGGSGMFKKYSSLENHYNSKFIEKLYTNGLTTGVWVAREKIHGTNFSLIIERDNVTCAKRTGPILPAEDFYGYEIVLKKYDKAIKTVQKFMYTARAVSYQVFGEFAGGGIQKGVDYGEKDFYVFDILINTESGDNTYLTDYEMQDFCNEFGFKMAPMLGRGTFDSLIMIPNDLDSVLAAYNATASEDLVEANNCVFDANVIGDNTAEGYVLKPCFPKWLPNGTRVAIKCKNSKFSEKKKSDKPIKTQVPLTEIDKNLLDVLACYVTLNRVNNVISKIGTVTPKDFGKVMGLTVQDILEETSREGIVLTTSDNPNLVKKELVRMVQDVLRPAWIELVS

SEQ ID NO: 3 - DNA, 1029 bp, synthetic construct
  misc_feature 1..1029: note = variant of RNA ligase 2 from Escherichia phage RB69 (Bacteriophage RB69)
  source 1..1029: mol_type = other DNA
atgcatcaccatcaccatcacggtggcagcggtatgtttaagaaatattctagtctggaaaaccattacaatagcaaattcattgagaaactctataccaacggcttaactactggtgtgtgggttgcgcgcgaaaagatccacgggacgaacttttcgctgattatcgagcgtgataatgtaacatgcgccaaacgtacaggcccgattttgcctgcagaagacttctacggttatgaaatcgtcctgaagaaatacgataaagcgattaagacggtgcagaaatttatgtataccgcccgcgcggtttcctaccaagtgttcggagaatttgctggcggcggtatccagaaaggtgtcgattatggcgagaaagacttctatgtgtttgatattctgatcaatacggaatcaggagacaacacgtacctgactgattatgaaatgcaggacttctgtaatgaatttgggtttaagatggcaccaatgcttggtcgcggcacattcgatagcctgattatgattccgaacgatttcgattcggttctcgccgcttacaatgcaacggcgagcgaggacctggtagaagcgaacaactgcgtctttgatgccaatgtgatcggtgataacactgctgaaggctatgttcttaaaccgtgtttccccaaatggttaccgaatgggacgcgtgtggcgatcaaatgcaagaactccaaattcagcgagaagaagaaaagtgacaaaccgatcaagacacaagtcccactgacggaaattgataagaatctgctggacgtattggcctgttacgtcactttaaaccgcgtgaacaacgtgatctctaagattggaacagtgacgccgaaagattttggcaaagtaatgggtctgactgttcaggatattctggaagaaacgtcacgtgagggtattgttctgacgacatcggacaatcctaatctcgtcaagaaagaacttgttcgcatggtgcaggatgtattacgtcccgcatggatcgaactggtgtcg

SEQ ID NO: 4 - protein, 343 aa, synthetic construct
  REGION 1..343: note = variant of RNA ligase 2 from Escherichia phage RB69 (Bacteriophage RB69)
MHHHHHHGGSGMFKKYSSLENHYNSKFIEKLYTNGLTTGVWVAREKIHGTNFSLIIERDNVTCAKRTGPILPAEDFYGYEIVLKKYDKAIKTVQKFMYTARAVSYQVFGEFAGGGIQKGVDYGEKDFYVFDILINTESGDNTYLTDYEMQDFCNEFGFKMAPMLGRGTFDSLIMIPNDFDSVLAAYNATASEDLVEANNCVFDANVIGDNTAEGYVLKPCFPKWLPNGTRVAIKCKNSKFSEKKKSDKPIKTQVPLTEIDKNLLDVLACYVTLNRVNNVISKIGTVTPKDFGKVMGLTVQDILEETSREGIVLTTSDNPNLVKKELVRMVQDVLRPAWIELVS

SEQ ID NO: 5 - DNA, 1029 bp, synthetic construct
  misc_feature 1..1029: note = variant of RNA ligase 2 from Escherichia phage RB69 (Bacteriophage RB69)
  source 1..1029: mol_type = other DNA
atgcatcaccatcaccatcacggtggcagcggtatgtttaagaaatattctagtctggaaaaccattacaatagcaaattcattgagaaactctataccaacggcttaactactggtgtgtgggttgcgcgcgaaaagatccacgggacgaacttttcgctgattatcgagcgtgataatgtaacatgcgccaaacgtacaggcccgattttgcctgcagaagacttctacggttatgaaatcgtcctgaagaaatacgataaagcgattaagacggtgcagaaatttatgtataccgcccgcgcggtttcctaccaagtgttcggagaatttgctggcggcggtatccagaaaggtgtcgattatggcgagaaagacttctatgtgtttgatattctgatcaatacggaatcaggagacaacacgtacctgactgattatgaaatgcaggacttctgtaatgaatttgggtttaagatggcaccaatgcttggtcgcggcacattcgatagcctgattatgattccgaacgatttggattcggttctcccggcttacaatgcaacggcgagcgaggacctggtagaagcgaacaactgcgtctttgatgccaatgtgatcggtgataacactgctgaaggctatgttcttaaaccgtgtttccccaaatggttaccgaatgggacgcgtgtggcgatcaaatgcaagaactccaaattcagcgagaagaagaaaagtgacaaaccgatcaagacacaagtcccactgacggaaattgataagaatctgctggacgtattggcctgttacgtcactttaaaccgcgtgaacaacgtgatctctaagattggaacagtgacgccgaaagattttggcaaagtaatgggtctgactgttcaggatattctggaagaaacgtcacgtgagggtattgttctgacgacatcggacaatcctaatctcgtcaagaaagaacttgttcgcatggtgcaggatgtattacgtcccgcatggatcgaactggtgtcg

SEQ ID NO: 6 - protein, 343 aa, synthetic construct
  REGION 1..343: note = variant of RNA ligase 2 from Escherichia phage RB69 (Bacteriophage RB69)
MHHHHHHGGSGMFKKYSSLENHYNSKFIEKLYTNGLTTGVWVAREKIHGTNFSLIIERDNVTCAKRTGPILPAEDFYGYEIVLKKYDKAIKTVQKFMYTARAVSYQVFGEFAGGGIQKGVDYGEKDFYVFDILINTESGDNTYLTDYEMQDFCNEFGFKMAPMLGRGTFDSLIMIPNDLDSVLPAYNATASEDLVEANNCVFDANVIGDNTAEGYVLKPCFPKWLPNGTRVAIKCKNSKFSEKKKSDKPIKTQVPLTEIDKNLLDVLACYVTLNRVNNVISKIGTVTPKDFGKVMGLTVQDILEETSREGIVLTTSDNPNLVKKELVRMVQDVLRPAWIELVS

SEQ ID NO: 7 - DNA, 1029 bp, synthetic construct
  misc_feature 1..1029: note = variant of RNA ligase 2 from Escherichia phage RB69 (Bacteriophage RB69)
  source 1..1029: mol_type = other DNA
atgcatcaccatcaccatcacggtggcagcggtatgtttaagaaatattctagtctggaaaaccattacaatagcaaattcattgagaaactctataccaacggcttaactactggtgtgtgggttgcgcgcgaaaagatccacgggacgaacttttcgctgattatcgagcgtgataatgtaacatgcgccaaacgtacaggcccgattttgcctgcagaagacttctacggttatgaaatcgtcctgaagaaatacgataaagcgattaagacggtgcagaaatttatgtataccgcccgcgcggtttcctaccaagtgttcggagaatttgctggcggcggtatccagaaaggtgtcgattatggcgagaaagacttctatgtgtttgatattctgatcaatacggaatcaggagacaacacgtacctgactgattatgaaatgcaggacttctgtaatgaatttgggtttaagatggcaccaatgcttggtcgcggcacattcgatagcctgattatgattccgaacgatttggattcggttctcgccgcttacaatgcaacggcgagcgaggacctggtaaaggcgaacaactgcgtctttgatgccaatgtgatcggtgataacactgctgaaggctatgttcttaaaccgtgtttccccaaatggttaccgaatgggacgcgtgtggcgatcaaatgcaagaactccaaattcagcgagaagaagaaaagtgacaaaccgatcaagacacaagtcccactgacggaaattgataagaatctgctggacgtattggcctgttacgtcactttaaaccgcgtgaacaacgtgatctctaagattggaacagtgacgccgaaagattttggcaaagtaatgggtctgactgttcaggatattctggaagaaacgtcacgtgagggtattgttctgacgacatcggacaatcctaatctcgtcaagaaagaacttgttcgcatggtgcaggatgtattacgtcccgcatggatcgaactggtgtcg

SEQ ID NO: 8 - protein, 343 aa, synthetic construct
  REGION 1..343: note = variant of RNA ligase 2 from Escherichia phage RB69 (Bacteriophage RB69)
MHHHHHHGGSGMFKKYSSLENHYNSKFIEKLYTNGLTTGVWVAREKIHGTNFSLIIERDNVTCAKRTGPILPAEDFYGYEIVLKKYDKAIKTVQKFMYTARAVSYQVFGEFAGGGIQKGVDYGEKDFYVFDILINTESGDNTYLTDYEMQDFCNEFGFKMAPMLGRGTFDSLIMIPNDLDSVLAAYNATASEDLVKANNCVFDANVIGDNTAEGYVLKPCFPKWLPNGTRVAIKCKNSKFSEKKKSDKPIKTQVPLTEIDKNLLDVLACYVTLNRVNNVISKIGTVTPKDFGKVMGLTVQDILEETSREGIVLTTSDNPNLVKKELVRMVQDVLRPAWIELVS

SEQ ID NO: 9 - DNA, 1029 bp, synthetic construct
  misc_feature 1..1029: note = variant of RNA ligase 2 from Escherichia phage RB69 (Bacteriophage RB69)
  source 1..1029: mol_type = other DNA
atgcatcaccatcaccatcacggtggcagcggtatgtttaagaaatattctagtctggaaaaccattacaatagcaaattcattgagaaactctataccaacggcttaactactggtgtgtgggttgcgcgcgaaaagatccacgggacgaacttttcgctgattatcgagcgtgataatgtaacatgcgccaaacgtacaggcccgattttgcctgcagaagacttctacggttatgaaatcgtcctgaagaaatacgataaagcgattaaggcggtgcagaaatttatgtataccgcccgcgcggtttcctaccaagtgttcggagaatttgctggcggcggtatccagaaaggtgtcgattatggcgagaaagacttctatgtgtttgatattctgatcaatacggaatcaggagacaacacgtacctgactgattatgaaatgcaggacttctgtaatgaatttgggtttaagatggcaccaatgcttggtcgcggcacattcgatagcctgattatgattccgaacgatttggattcggttctcgccgcttacaatgcaacggcgagcgaggacctggtagaagcgaacaactgcgtctttgatgccaatgtgatcggtgataacactgctgaaggctatgttcttaaaccgtgtttccccaaatggttaccgaatgggacgcgtgtggcgatcaaatgcaagaactccaaattcagcgagaagaagaaaagtgacaaaccgatcaagacacaagtcccactgacggaaattgataagaatctgctggacgtattggcctgttacgtcactttaaaccgcgtgaacaacgtgatctctaagattggaacagtgacgccgaaagattttggcaaagtaatgggtctgactgttcaggatattctggaagaaacgtcacgtgagggtattgttctgacgacatcggacaatcctaatctcgtcaagaaagaacttgttcgcatggtgcaggatgtattacgtcccgcatggatcgaactggtgtcg

SEQ ID NO: 10 - protein, 343 aa, synthetic construct
  REGION 1..343: note = variant of RNA ligase 2 from Escherichia phage RB69 (Bacteriophage RB69)
MHHHHHHGGSGMFKKYSSLENHYNSKFIEKLYTNGLTTGVWVAREKIHGTNFSLIIERDNVTCAKRTGPILPAEDFYGYEIVLKKYDKAIKAVQKFMYTARAVSYQVFGEFAGGGIQKGVDYGEKDFYVFDILINTESGDNTYLTDYEMQDFCNEFGFKMAPMLGRGTFDSLIMIPNDLDSVLAAYNATASEDLVEANNCVFDANVIGDNTAEGYVLKPCFPKWLPNGTRVAIKCKNSKFSEKKKSDKPIKTQVPLTEIDKNLLDVLACYVTLNRVNNVISKIGTVTPKDFGKVMGLTVQDILEETSREGIVLTTSDNPNLVKKELVRMVQDVLRPAWIELVS

SEQ ID NO: 11 - DNA, 1029 bp, synthetic construct
  misc_feature 1..1029: note = variant of RNA ligase 2 from Escherichia phage RB69 (Bacteriophage RB69)
  source 1..1029: mol_type = other DNA
atgcatcaccatcaccatcacggtggcagcggtatgtttaagaaatattctagtctggaaaaccattacaatagcaaattcattgagaaactctataccaacggcttaactactggtgaatgggttgcgcgcgaaaagatccacgggacgaacttttcgctgattatcgagcgtgataatgtaacatgcgccaaacgtacaggcccgattttgcctgcagaagacttctacggttatgaaatcgtcctgaagaaatacgataaagcgattaagacggtgcagaaatttatgtataccgcccgcgcggtttcctaccaagtgttcggagaatttgctggcggcggtatccagaaaggtgtcgattatggcgagaaagacttctatgtgtttgatattctgatcaatacggaatcaggagacaacacgtacctgactgattatgaaatgcaggacttctgtaatgaatttgggtttaagatggcaccaatgcttggtcgcggcacattcgatagcctgattatgattccgaacgatttggattcggttctcgccgcttacaatgcaacggcgagcgaggacctggtagaagcgaacaactgcgtctttgatgccaatgtgatcggtgataacactgctgaaggctatgttcttaaaccgtgtttccccaaatggttaccgaatgggacgcgtgtggcgatcaaatgcaagaactccaaattcagcgagaagaagaaaagtgacaaaccgatcaagacacaagtcccactgacggaaattgataagaatctgctggacgtattggcctgttacgtcactttaaaccgcgtgaacaacgtgatctctaagattggaacagtgacgccgaaagattttggcaaagtaatgggtctgactgttcaggatattctggaagaaacgtcacgtgagggtattgttctgacgacatcggacaatcctaatctcgtcaagaaagaacttgttcgcatggtgcaggatgtattacgtcccgcatggatcgaactggtgtcg

SEQ ID NO: 12 - protein, 343 aa, synthetic construct
  REGION 1..343: note = variant of RNA ligase 2 from Escherichia phage RB69 (Bacteriophage RB69)
MHHHHHHGGSGMFKKYSSLENHYNSKFIEKLYTNGLTTGEWVAREKIHGTNFSLIIERDNVTCAKRTGPILPAEDFYGYEIVLKKYDKAIKTVQKFMYTARAVSYQVFGEFAGGGIQKGVDYGEKDFYVFDILINTESGDNTYLTDYEMQDFCNEFGFKMAPMLGRGTFDSLIMIPNDLDSVLAAYNATASEDLVEANNCVFDANVIGDNTAEGYVLKPCFPKWLPNGTRVAIKCKNSKFSEKKKSDKPIKTQVPLTEIDKNLLDVLACYVTLNRVNNVISKIGTVTPKDFGKVMGLTVQDILEETSREGIVLTTSDNPNLVKKELVRMVQDVLRPAWIELVS

SEQ ID NO: 13 - DNA, 1029 bp, synthetic construct
  misc_feature 1..1029: note = variant of RNA ligase 2 from Escherichia phage RB69 (Bacteriophage RB69)
  source 1..1029: mol_type = other DNA
atgcatcaccatcaccatcacggtggcagcggtatgtttaagaaatattctagtctggaaaaccattacaatagcaaattcattgagaaactctataccaacggcttaactactggtgtgtgggttgcgcgcgaaaagatccacgggacgaacttttcgctgattatcgagcgtgataatgtaacatgcgccaaacgtacaggcccgattttgcctgcagaagacttctacggttatgaaatcatcctgaagaaatacgataaagcgattaagacggtgcagaaatttatgtataccgcccgcgcggtttcctaccaagtgttcggagaatttgctggcggcggtatccagaaaggtgtcgattatggcgagaaagacttctatgtgtttgatattctgatcaatacggaatcaggagacaacacgtacctgactgattatgaaatgcaggacttctgtaatgaatttgggtttaagatggcaccaatgcttggtcgcggcacattcgatagcctgattatgattccgaacgatttggattcggttctcgccgcttacaatgcaacggcgagcgaggacctggtagaagcgaacaactgcgtctttgatgccaatgtgatcggtgataacactgctgaaggctatgttcttaaaccgtgtttccccaaatggttaccgaatgggacgcgtgtggcgatcaaatgcaagaactccaaattcagcgagaagaagaaaagtgacaaaccgatcaagacacaagtcccactgacggaaattgataagaatctgctggacgtattggcctgttacgtcactttaaaccgcgtgaacaacgtgatctctaagattggaacagtgacgccgaaagattttggcaaagtaatgggtctgactgttcaggatattctggaagaaacgtcacgtgagggtattgttctgacgacatcggacaatcctaatctcgtcaagaaagaacttgttcgcatggtgcaggatgtattacgtcccgcatggatcgaactggtgtcg

SEQ ID NO: 14 - protein, 343 aa, synthetic construct
  REGION 1..343: note = variant of RNA ligase 2 from Escherichia phage RB69 (Bacteriophage RB69)
MHHHHHHGGSGMFKKYSSLENHYNSKFIEKLYTNGLTTGVWVAREKIHGTNFSLIIERDNVTCAKRTGPILPAEDFYGYEIILKKYDKAIKTVQKFMYTARAVSYQVFGEFAGGGIQKGVDYGEKDFYVFDILINTESGDNTYLTDYEMQDFCNEFGFKMAPMLGRGTFDSLIMIPNDLDSVLAAYNATASEDLVEANNCVFDANVIGDNTAEGYVLKPCFPKWLPNGTRVAIKCKNSKFSEKKKSDKPIKTQVPLTEIDKNLLDVLACYVTLNRVNNVISKIGTVTPKDFGKVMGLTVQDILEETSREGIVLTTSDNPNLVKKELVRMVQDVLRPAWIELVS

SEQ ID NO: 15 - DNA, 1029 bp, synthetic construct
  misc_feature 1..1029: note = variant of RNA ligase 2 from Escherichia phage RB69 (Bacteriophage RB69)
  source 1..1029: mol_type = other DNA
atgcatcaccatcaccatcacggtggcagcggtatgtttaagaaatattctagtctggaaaaccattacaatagcaaattcattgagaaactccgcaccaacggcttaactactggtgtgtgggttgcgcgcgaaaagatccacgggacgaacttttcgctgattatcgagcgtgataatgtaacatgcgccaaacgtacaggcccgattttgcctgcagaagacttctacggttatgaaatcgtcctgaagaaatacgataaagcgattaagacggtgcagaaatttatgtataccgcccgcgcggtttcctaccaagtgttcggagaatttgctggcggcggtatccagaaaggtgtcgattatggcgagaaagacttctatgtgtttgatattctgatcaatacggaatcaggagacaacacgtacctgactgattatgaaatgcaggacttctgtaatgaatttgggtttaagatggcaccaatgcttggtcgcggcacattcgatagcctgattatgattccgaacgatttggattcggttctcgccgcttacaatgcaacggcgagcgaggacctggtagaagcgaacaactgcgtctttgatgccaatgtgatcggtgataacactgctgaaggctatgttcttaaaccgtgtttccccaaatggttaccgaatgggacgcgtgtggcgatcaaatgcaagaactccaaattcagcgagaagaagaaaagtgacaaaccgatcaagacacaagtcccactgacggaaattgataagaatctgctggacgtattggcctgttacgtcactttaaaccgcgtgaacaacgtgatctctaagattggaacagtgacgccgaaagattttggcaaagtaatgggtctgactgttcaggatattctggaagaaacgtcacgtgagggtattgttctgacgacatcggacaatcctaatctcgtcaagaaagaacttgttcgcatggtgcaggatgtattacgtcccgcatggatcgaactggtgtcg

SEQ ID NO: 16 - protein, 343 aa, synthetic construct
  REGION 1..343: note = variant of RNA ligase 2 from Escherichia phage RB69 (Bacteriophage RB69)
MHHHHHHGGSGMFKKYSSLENHYNSKFIEKLRTNGLTTGVWVAREKIHGTNFSLIIERDNVTCAKRTGPILPAEDFYGYEIVLKKYDKAIKTVQKFMYTARAVSYQVFGEFAGGGIQKGVDYGEKDFYVFDILINTESGDNTYLTDYEMQDFCNEFGFKMAPMLGRGTFDSLIMIPNDLDSVLAAYNATASEDLVEANNCVFDANVIGDNTAEGYVLKPCFPKWLPNGTRVAIKCKNSKFSEKKKSDKPIKTQVPLTEIDKNLLDVLACYVTLNRVNNVISKIGTVTPKDFGKVMGLTVQDILEETSREGIVLTTSDNPNLVKKELVRMVQDVLRPAWIELVS

SEQ ID NO: 17 - DNA, 1029 bp, synthetic construct
  misc_feature 1..1029: note = variant of RNA ligase 2 from Escherichia phage RB69 (Bacteriophage RB69)
  source 1..1029: mol_type = other DNA
atgcatcaccatcaccatcacggtggcagcggtatgtttaagaaatattctagtctggaaaaccattacaatagcaaattcattgagaaactctataccaacggcttaactactggtgtgtgggttgcgcgcgaaaagatccacgggacgaacttttcgctgattatcgagcgtgataatgtaacatgcgccaaacgtacaggcccgattttgcctgcagaagacttctacggttatgaaatcgtcctgaagaaatacgataaagcgattaagacggtgcagaaatttatgtataccgcccgcgcggtttcctaccaagtgttcggagaatttgctggcggcggtatccagaaaggtgtcgattatggcgagaaagacttctatgtgtttgatattctgatcaatacggaatcaggagacaacacgtacctgactgattatgaaatgcaggacttctgtaatgaatttgggtttaagatggcaccaatgcttggtcgcggcacattcgatagcctgattatgattccgaacgatttggattcggttctcgccgcttacaatgcaacggcgagcgaggacctggtagaagcgaacaactgcgtctttgatgccaatgtgactggtgataacactgctgaaggctatgttcttaaaccgtgtttccccaaatggttaccgaatgggacgcgtgtggcgatcaaatgcaagaactccaaattcagcgagaagaagaaaagtgacaaaccgatcaagacacaagtcccactgacggaaattgataagaatctgctggacgtattggcctgttacgtcactttaaaccgcgtgaacaacgtgatctctaagattggaacagtgacgccgaaagattttggcaaagtaatgggtctgactgttcaggatattctggaagaaacgtcacgtgagggtattgttctgacgacatcggacaatcctaatctcgtcaagaaagaacttgttcgcatggtgcaggatgtattacgtcccgcatggatcgaactggtgtcg

SEQ ID NO: 18 - protein, 343 aa, synthetic construct
  REGION 1..343: note = variant of RNA ligase 2 from Escherichia phage RB69 (Bacteriophage RB69)
MHHHHHHGGSGMFKKYSSLENHYNSKFIEKLYTNGLTTGVWVAREKIHGTNFSLIIERDNVTCAKRTGPILPAEDFYGYEIVLKKYDKAIKTVQKFMYTARAVSYQVFGEFAGGGIQKGVDYGEKDFYVFDILINTESGDNTYLTDYEMQDFCNEFGFKMAPMLGRGTFDSLIMIPNDLDSVLAAYNATASEDLVEANNCVFDANVTGDNTAEGYVLKPCFPKWLPNGTRVAIKCKNSKFSEKKKSDKPIKTQVPLTEIDKNLLDVLACYVTLNRVNNVISKIGTVTPKDFGKVMGLTVQDILEETSREGIVLTTSDNPNLVKKELVRMVQDVLRPAWIELVS

SEQ ID NO: 19 - DNA, 1029 bp, synthetic construct
  misc_feature 1..1029: note = variant of RNA ligase 2 from Escherichia phage RB69 (Bacteriophage RB69)
  source 1..1029: mol_type = other DNA
atgcatcaccatcaccatcacggtggcagcggtatgtttaagaaatattctagtctggaaaaccattacaatagcaaattcattgagaaactctataagaacggcttaactactggtgtgtgggttgcgcgcgaaaagatccacgggacgaacttttcgctgattatcgagcgtgataatgtaacatgcgccaaacgtacaggcccgattttgcctgcagaagacttctacggttatgaaatcgtcctgaagaaatacgataaagcgattaagacggtgcagaaatttatgtataccgcccgcgcggtttcctaccaagtgttcggagaatttgctggcggcggtatccagaaaggtgtcgattatggcgagaaagacttctatgtgtttgatattctgatcaatacggaatcaggagacaacacgtacctgactgattatgaaatgcaggacttctgtaatgaatttgggtttaagatggcaccaatgcttggtcgcggcacattcgatagcctgattatgattccgaacgatttggattcggttctcgccgcttacaatgcaacggcgagcgaggacctggtagaagcgaacaactgcgtctttgatgccaatgtgatcggtgataacactgctgaaggctatgttcttaaaccgtgtttccccaaatggttaccgaatgggacgcgtgtggcgatcaaatgcaagaactccaaattcagcgagaagaagaaaagtgacaaaccgatcaagacacaagtcccactgacggaaattgataagaatctgctggacgtattggcctgttacgtcactttaaaccgcgtgaacaacgtgatctctaagattggaacagtgacgccgaaagattttggcaaagtaatgggtctgactgttcaggatattctggaagaaacgtcacgtgagggtattgttctgacgacatcggacaatcctaatctcgtcaagaaagaacttgttcgcatggtgcaggatgtattacgtcccgcatggatcgaactggtgtcg

SEQ ID NO: 20 - protein, 343 aa, synthetic construct
  REGION 1..343: note = variant of RNA ligase 2 from Escherichia phage RB69 (Bacteriophage RB69)
MHHHHHHGGSGMFKKYSSLENHYNSKFIEKLYKNGLTTGVWVAREKIHGTNFSLIIERDNVTCAKRTGPILPAEDFYGYEIVLKKYDKAIKTVQKFMYTARAVSYQVFGEFAGGGIQKGVDYGEKDFYVFDILINTESGDNTYLTDYEMQDFCNEFGFKMAPMLGRGTFDSLIMIPNDLDSVLAAYNATASEDLVEANNCVFDANVIGDNTAEGYVLKPCFPKWLPNGTRVAIKCKNSKFSEKKKSDKPIKTQVPLTEIDKNLLDVLACYVTLNRVNNVISKIGTVTPKDFGKVMGLTVQDILEETSREGIVLTTSDNPNLVKKELVRMVQDVLRPAWIELVS

SEQ ID NO: 21 - DNA, 1029 bp, synthetic construct
  misc_feature 1..1029: note = variant of RNA ligase 2 from Escherichia phage RB69 (Bacteriophage RB69)
  source 1..1029: mol_type = other DNA
atgcatcaccatcaccatcacggtggcagcggtatgtttaagaaatattctagtctggaaaaccattacaatagcaaattcattgagaaactctataccaacggcttaactactggtgtgtgggttgcgcgcgaaaagatccacgggacgaacttttcgctgattatcgagcgtgataatgtaacatgcgccaaacgtacaggcccgattttgcctgcagaagacttctacggttatgaaatcgtcctgaagaaatacgataaagcgattaagacggtgcagaaatttatgtataccgcccgcgcggtttcctaccaagtgttcggagaatttgctggcaaaggtatccagaaaggtgtcgattatggcgagaaagacttctatgtgtttgatattctgatcaatacggaatcaggagacaacacgtacctgactgattatgaaatgcaggacttctgtaatgaatttgggtttaagatggcaccaatgcttggtcgcggcacattcgatagcctgattatgattccgaacgatttggattcggttctcgccgcttacaatgcaacggcgagcgaggacctggtagaagcgaacaactgcgtctttgatgccaatgtgatcggtgataacactgctgaaggctatgttcttaaaccgtgtttccccaaatggttaccgaatgggacgcgtgtggcgatcaaatgcaagaactccaaattcagcgagaagaagaaaagtgacaaaccgatcaagacacaagtcccactgacggaaattgataagaatctgctggacgtattggcctgttacgtcactttaaaccgcgtgaacaacgtgatctctaagattggaacagtgacgccgaaagattttggcaaagtaatgggtctgactgttcaggatattctggaagaaacgtcacgtgagggtattgttctgacgacatcggacaatcctaatctcgtcaagaaagaacttgttcgcatggtgcaggatgtattacgtcccgcatggatcgaactggtgtcg

SEQ ID NO: 22 - protein, 343 aa, synthetic construct
  REGION 1..343: note = variant of RNA ligase 2 from Escherichia phage RB69 (Bacteriophage RB69)
MHHHHHHGGSGMFKKYSSLENHYNSKFIEKLYTNGLTTGVWVAREKIHGTNFSLIIERDNVTCAKRTGPILPAEDFYGYEIVLKKYDKAIKTVQKFMYTARAVSYQVFGEFAGKGIQKGVDYGEKDFYVFDILINTESGDNTYLTDYEMQDFCNEFGFKMAPMLGRGTFDSLIMIPNDLDSVLAAYNATASEDLVEANNCVFDANVIGDNTAEGYVLKPCFPKWLPNGTRVAIKCKNSKFSEKKKSDKPIKTQVPLTEIDKNLLDVLACYVTLNRVNNVISKIGTVTPKDFGKVMGLTVQDILEETSREGIVLTTSDNPNLVKKELVRMVQDVLRPAWIELVS

SEQ ID NO: 23 - DNA, 1029 bp, synthetic construct
  misc_feature 1..1029: note = variant of RNA ligase 2 from Escherichia phage RB69 (Bacteriophage RB69)
  source 1..1029: mol_type = other DNA
atgcatcaccatcaccatcacggtggcagcggtatgtttaagaaatattctagtctggaaaaccattacaatagcaaattcattgagaaactctataccaacggcttaactactggtgtgtgggttgcgcgcgaaaagatccacgggacgaacttttcgctgattatcgagcgtgataatgtaacatgcgccaaacgtacaggcccgattttgcctgcagaagacttctacggttatgaaatcgtcctgaagaaatacgataaagcgattaagacggtgcagaaatttatgtataccgcccgcgcggtttcctaccaagtgttcggagaatttgctggcggcggtatccagaaaggtgtcgattatggcgagaaagacttctatgtgtttgatattctgatcaatacggaatcaggagacaacacgtacctgactgattatgaaatgcaggacttctgtaatgaatttgggtttaagatggcaccaatgcttggtcgcggcacattcgatgaactgattatgattccgaacgatttggattcggttctcgccgcttacaatgcaacggcgagcgaggacctggtagaagcgaacaactgcgtctttgatgccaatgtgatcggtgataacactgctgaaggctatgttcttaaaccgtgtttccccaaatggttaccgaatgggacgcgtgtggcgatcaaatgcaagaactccaaattcagcgagaagaagaaaagtgacaaaccgatcaagacacaagtcccactgacggaaattgataagaatctgctggacgtattggcctgttacgtcactttaaaccgcgtgaacaacgtgatctctaagattggaacagtgacgccgaaagattttggcaaagtaatgggtctgactgttcaggatattctggaagaaacgtcacgtgagggtattgttctgacgacatcggacaatcctaatctcgtcaagaaagaacttgttcgcatggtgcaggatgtattacgtcccgcatggatcgaactggtgtcg

SEQ ID NO: 24 - protein, 343 aa, synthetic construct
  REGION 1..343: note = variant of RNA ligase 2 from Escherichia phage RB69 (Bacteriophage RB69)
MHHHHHHGGSGMFKKYSSLENHYNSKFIEKLYTNGLTTGVWVAREKIHGTNFSLIIERDNVTCAKRTGPILPAEDFYGYEIVLKKYDKAIKTVQKFMYTARAVSYQVFGEFAGGGIQKGVDYGEKDFYVFDILINTESGDNTYLTDYEMQDFCNEFGFKMAPMLGRGTFDELIMIPNDLDSVLAAYNATASEDLVEANNCVFDANVIGDNTAEGYVLKPCFPKWLPNGTRVAIKCKNSKFSEKKKSDKPIKTQVPLTEIDKNLLDVLACYVTLNRVNNVISKIGTVTPKDFGKVMGLTVQDILEETSREGIVLTTSDNPNLVKKELVRMVQDVLRPAWIELVS

SEQ ID NO: 25 - DNA, 1029 bp, synthetic construct
  misc_feature 1..1029: note = variant of RNA ligase 2 from Escherichia phage RB69 (Bacteriophage RB69)
  source 1..1029: mol_type = other DNA
atgcatcaccatcaccatcacggtggcagcggtatgtttaagaaatattctagtctggaaaaccattacaatagcaaattcattgagaaactctatgcgaacggcttaactactggtgtgtgggttgcgcgcgaaaagatccacgggacgaacttttcgctgattatcgagcgtgataatgtaacatgcgccaaacgtacaggcccgattttgcctgcagaagacttctacggttatgaaatcgtcctgaagaaatacgataaagcgattaagacggtgcagaaatttatgtataccgcccgcgcggtttcctaccaagtgttcggagaatttgctggcggcggtatccagaaaggtgtcgattatggcgagaaagacttctatgtgtttgatattctgatcaatacggaatcaggagacaacacgtacctgactgattatgaaatgcaggacttctgtaatgaatttgggtttaagatggcaccaatgcttggtcgcggcacattcgatagcctgattatgattccgaacgatttggattcggttctcgccgcttacaatgcaacggcgagcgaggacctggtagaagcgaacaactgcgtctttgatgccaatgtgatcggtgataacactgctgaaggctatgttcttaaaccgtgtttccccaaatggttaccgaatgggacgcgtgtggcgatcaaatgcaagaactccaaattcagcgagaagaagaaaagtgacaaaccgatcaagacacaagtcccactgacggaaattgataagaatctgctggacgtattggcctgttacgtcactttaaaccgcgtgaacaacgtgatctctaagattggaacagtgacgccgaaagattttggcaaagtaatgggtctgactgttcaggatattctggaagaaacgtcacgtgagggtattgttctgacgacatcggacaatcctaatctcgtcaagaaagaacttgttcgcatggtgcaggatgtattacgtcccgcatggatcgaactggtgtcg

SEQ ID NO: 26 - protein, 343 aa, synthetic construct
  REGION 1..343: note = variant of RNA ligase 2 from Escherichia phage RB69 (Bacteriophage RB69)
MHHHHHHGGSGMFKKYSSLENHYNSKFIEKLYANGLTTGVWVAREKIHGTNFSLIIERDNVTCAKRTGPILPAEDFYGYEIVLKKYDKAIKTVQKFMYTARAVSYQVFGEFAGGGIQKGVDYGEKDFYVFDILINTESGDNTYLTDYEMQDFCNEFGFKMAPMLGRGTFDSLIMIPNDLDSVLAAYNATASEDLVEANNCVFDANVIGDNTAEGYVLKPCFPKWLPNGTRVAIKCKNSKFSEKKKSDKPIKTQVPLTEIDKNLLDVLACYVTLNRVNNVISKIGTVTPKDFGKVMGLTVQDILEETSREGIVLTTSDNPNLVKKELVRMVQDVLRPAWIELVS

SEQ ID NO: 27 - DNA, 1029 bp, synthetic construct
  misc_feature 1..1029: note = variant of RNA ligase 2 from Escherichia phage RB69 (Bacteriophage RB69)
  source 1..1029: mol_type = other DNA
atgcatcaccatcaccatcacggtggcagcggtatgtttaagaaatattctagtctggaaaaccattacaatagcaaattcattgagaaactctataccaacggcttaactactggtgtgtgggttgcgcgcgaaaagatccacgggacgaacttttcgctgattatcgagcgtgataatgtaacatgcgccaaacgtacaggcccgattttgcctgcagaagacttctacggttatgaaatcgtcctgaagaaatacgataaagcgattaagacggtgcagaaatttatgtataccgcccgcgcggtttcctaccaagtgttcggagaatttgctggcggcggtatccagaaaggtgtcgattatggcgagaaagacttctatgtgtttgatattctgatcaatacggaatcaggagacaacacgtacctgactgattatgaaatgcaggacttctgtaatgaatttgggtttaagatggcaccaatgcttggtcgcggcacattcgatagcctgattatgattccgaacgatttggattcggttctcgccgcttacaatgcaacggcgagcgaggacctggtagaagcgaacaactgcgtctttgatgccaatgtgatcggtgataacactgctgaaggctatgttcttaaaccgtgtgagcccaaatggttaccgaatgggacgcgtgtggcgatcaaatgcaagaactccaaattcagcgagaagaagaaaagtgacaaaccgatcaagacacaagtcccactgacggaaattgataagaatctgctggacgtattggcctgttacgtcactttaaaccgcgtgaacaacgtgatctctaagattggaacagtgacgccgaaagattttggcaaagtaatgggtctgactgttcaggatattctggaagaaacgtcacgtgagggtattgttctgacgacatcggacaatcctaatctcgtcaagaaagaacttgttcgcatggtgcaggatgtattacgtcccgcatggatcgaactggtgtcg

SEQ ID NO: 28 - protein, 343 aa, synthetic construct
  REGION 1..343: note = variant of RNA ligase 2 from Escherichia phage RB69 (Bacteriophage RB69)
MHHHHHHGGSGMFKKYSSLENHYNSKFIEKLYTNGLTTGVWVAREKIHGTNFSLIIERDNVTCAKRTGPILPAEDFYGYEIVLKKYDKAIKTVQKFMYTARAVSYQVFGEFAGGGIQKGVDYGEKDFYVFDILINTESGDNTYLTDYEMQDFCNEFGFKMAPMLGRGTFDSLIMIPNDLDSVLAAYNATASEDLVEANNCVFDANVIGDNTAEGYVLKPCEPKWLPNGTRVAIKCKNSKFSEKKKSDKPIKTQVPLTEIDKNLLDVLACYVTLNRVNNVISKIGTVTPKDFGKVMGLTVQDILEETSREGIVLTTSDNPNLVKKELVRMVQDVLRPAWIELVS

SEQ ID NO: 29 - DNA, 1029 bp, synthetic construct
  misc_feature 1..1029: note = variant of RNA ligase 2 from Escherichia phage RB69 (Bacteriophage RB69)
  source 1..1029: mol_type = other DNA
atgcatcaccatcaccatcacggtggcagcggtatgtttaagaaatattctagtctggaaaaccattacaatagcaaattcattgagaaactctataccaacggcttaactactggtgtgtgggttgcgcgcgaaaagatccacgggacgaacttttcgctgattatcgagcgtgataatgtaacatgcgccaaacgtacaggcccgattttgcctgcagaagacttctacggttatgaaatcgtcctgaagaaatacgataaagcgattaagacggtgcagaaatttatgtataccgcccgcgcggtttcctaccaagtgttcggagaatttgctggcggcggtatccagaaaggtgtcgattatggcgagaaagacttctatgtgtttgatattctgatcaatacggaatcaggagacaacacgtacctgactgattatgaaatgcaggacttctgtaatgaatttgggtttaagatggcaccaatgcttggtcgcggcacattcgatagcctgattatgattccgaacgatttggattcggttctcgccgcttacaatgcaacggcgagcgaggacctggtagaagcgaacaactgcgtctttgatgccaatgtgagtggtgataacactgctgaaggctatgttcttaaaccgtgtttccccaaatggttaccgaatgggacgcgtgtggcgatcaaatgcaagaactccaaattcagcgagaagaagaaaagtgacaaaccgatcaagacacaagtcccactgacggaaattgataagaatctgctggacgtattggcctgttacgtcactttaaaccgcgtgaacaacgtgatctctaagattggaacagtgacgccgaaagattttggcaaagtaatgggtctgactgttcaggatattctggaagaaacgtcacgtgagggtattgttctgacgacatcggacaatcctaatctcgtcaagaaagaacttgttcgcatggtgcaggatgtattacgtcccgcatggatcgaactggtgtcg

SEQ ID NO: 30 - protein, 343 aa, synthetic construct
  REGION 1..343: note = variant of RNA ligase 2 from Escherichia phage RB69 (Bacteriophage RB69)
MHHHHHHGGSGMFKKYSSLENHYNSKFIEKLYTNGLTTGVWVAREKIHGTNFSLIIERDNVTCAKRTGPILPAEDFYGYEIVLKKYDKAIKTVQKFMYTARAVSYQVFGEFAGGGIQKGVDYGEKDFYVFDILINTESGDNTYLTDYEMQDFCNEFGFKMAPMLGRGTFDSLIMIPNDLDSVLAAYNATASEDLVEANNCVFDANVSGDNTAEGYVLKPCFPKWLPNGTRVAIKCKNSKFSEKKKSDKPIKTQVPLTEIDKNLLDVLACYVTLNRVNNVISKIGTVTPKDFGKVMGLTVQDILEETSREGIVLTTSDNPNLVKKELVRMVQDVLRPAWIELVS

SEQ ID NO: 31 - DNA, 1029 bp, synthetic construct
  misc_feature 1..1029: note = variant of RNA ligase 2 from Escherichia phage RB69 (Bacteriophage RB69)
  source 1..1029: mol_type = other DNA
atgcatcaccatcaccatcacggtggcagcggtatgtttaagaaatattctagtctggaaaaccattacaatagcaaattcattgagaaactctataccaacggcttaactactggtgtgtgggttgcgcgcgaaaagatccacgggacgaacttttcgctgattatcgagcgtgataatgtaacatgcgccaaacgtacaggcccgattttgcctgcagaagacttctacggttatgaaatcgtcctgaagaaatacgataaagcgattaagacggtgcagaaatttatgtataccgcccgcgcggtttcctaccaagtgttcggagaatttgctggcggcggtatccagaaaggtgtcgattatggcgagaaagacttctatgtgtttgatattctgatcaatacggaatcaggagacaacacgtacctgactgattatgaaatgcaggacttctgtaatgaatttgggtttaagatggcaccaatgcttggtcgcggcacattcgatagcctgattatgattccgaacgatttggattcggttctcgccgcttacaatgcaacggcgagcgaggacctggtagaagcgaacaactgcgtctgggatgccaatgtgatcggtgataacactgctgaaggctatgttcttaaaccgtgtttccccaaatggttaccgaatgggacgcgtgtggcgatcaaatgcaagaactccaaattcagcgagaagaagaaaagtgacaaaccgatcaagacacaagtcccactgacggaaattgataagaatctgctggacgtattggcctgttacgtcactttaaaccgcgtgaacaacgtgatctctaagattggaacagtgacgccgaaagattttggcaaagtaatgggtctgactgttcaggatattctggaagaaacgtcacgtgagggtattgttctgacgacatcggacaatcctaatctcgtcaagaaagaacttgttcgcatggtgcaggatgtattacgtcccgcatggatcgaactggtgtcg

SEQ ID NO: 32 - protein, 343 aa, synthetic construct
  REGION 1..343: note = variant of RNA ligase 2 from Escherichia phage RB69 (Bacteriophage RB69)
MHHHHHHGGSGMFKKYSSLENHYNSKFIEKLYTNGLTTGVWVAREKIHGTNFSLIIERDNVTCAKRTGPILPAEDFYGYEIVLKKYDKAIKTVQKFMYTARAVSYQVFGEFAGGGIQKGVDYGEKDFYVFDILINTESGDNTYLTDYEMQDFCNEFGFKMAPMLGRGTFDSLIMIPNDLDSVLAAYNATASEDLVEANNCVWDANVIGDNTAEGYVLKPCFPKWLPNGTRVAIKCKNSKFSEKKKSDKPIKTQVPLTEIDKNLLDVLACYVTLNRVNNVISKIGTVTPKDFGKVMGLTVQDILEETSREGIVLTTSDNPNLVKKELVRMVQDVLRPAWIELVS

SEQ ID NO: 33 - DNA, 1029 bp, synthetic construct
  misc_feature 1..1029: note = variant of RNA ligase 2 from Escherichia phage RB69 (Bacteriophage RB69)
  source 1..1029: mol_type = other DNA
atgcatcaccatcaccatcacggtggcagcggtatgtttaagaaatattctagtctggaaaaccattacaatagcaaattcattgagaaactctataccaacggcttaactactggtgtgtgggttgcgcgcgaaaagatccacgggacgaacttttcgctgattatcgagcgtgataatgtaacatgcgccaaacgtacaggcccgattttgcctgcagaagacttctacggttatgaaatcgtcctgaagaaatacgataaagcgattaagacggtgcagaaatttatgtataccgccggggcggtttcctaccaagtgttcggagaatttgctggcggcggtatccagaaaggtgtcgattatggcgagaaagacttctatgtgtttgatattctgatcaatacggaatcaggagacaacacgtacctgactgattatgaaatgcaggacttctgtaatgaatttgggtttaagatggcaccaatgcttggtcgcggcacattcgatagcctgattatgattccgaacgatttggattcggttctcgccgcttacaatgcaacggcgagcgaggacctggtagaagcgaacaactgcgtctttgatgccaatgtgatcggtgataacactgctgaaggctatgttcttaaaccgtgtttccccaaatggttaccgaatgggacgcgtgtggcgatcaaatgcaagaactccaaattcagcgagaagaagaaaagtgacaaaccgatcaagacacaagtcccactgacggaaattgataagaatctgctggacgtattggcctgttacgtcactttaaaccgcgtgaacaacgtgatctctaagattggaacagtgacgccgaaagattttggcaaagtaatgggtctgactgttcaggatattctggaagaaacgtcacgtgagggtattgttctgacgacatcggacaatcctaatctcgtcaagaaagaacttgttcgcatggtgcaggatgtattacgtcccgcatggatcgaactggtgtcg

SEQ ID NO: 34 - protein, 343 aa, synthetic construct
  REGION 1..343: note = variant of RNA ligase 2 from Escherichia phage RB69 (Bacteriophage RB69)
MHHHHHHGGSGMFKKYSSLENHYNSKFIEKLYTNGLTTGVWVAREKIHGTNFSLIIERDNVTCAKRTGPILPAEDFYGYEIVLKKYDKAIKTVQKFMYTAGAVSYQVFGEFAGGGIQKGVDYGEKDFYVFDILINTESGDNTYLTDYEMQDFCNEFGFKMAPMLGRGTFDSLIMIPNDLDSVLAAYNATASEDLVEANNCVFDANVIGDNTAEGYVLKPCFPKWLPNGTRVAIKCKNSKFSEKKKSDKPIKTQVPLTEIDKNLLDVLACYVTLNRVNNVISKIGTVTPKDFGKVMGLTVQDILEETSREGIVLTTSDNPNLVKKELVRMVQDVLRPAWIELVS

SEQ ID NO: 35 - DNA, 1029 bp, synthetic construct
  misc_feature 1..1029: note = variant of RNA ligase 2 from Escherichia phage RB69 (Bacteriophage RB69)
  source 1..1029: mol_type = other DNA
atgcatcaccatcaccatcacggtggcagcggtatgtttaagaaatattctagtctggaaaaccattacaatagcaaattcattgagaaactctataccaacggcttaactactggtgtgtgggttgcgcgcgaaaagatccacgggacgaacttttcgctgattatcgagcgtgataatgtaacatgcgccaaacgtacaggcccgattttgcctgcagaagacttctacggttatgaaatcgtcctgaagaaatacgataaagcgattaagacggtgcagaaatttatgtataccgcccgcgcggtttcctaccaagtgttcggagaatttgctggcggcggtatccagaaaggtgtcgattatggcgagaaagacttctatgtgtttgatattctgatcaatacggaatcaggagacaacacgtacctgactgattatgaaatgcaggacttctgtaatgaatttgggtttaagatggcaccaatgcttggtcgcggcacattcgatagcctgattatgattccgaacgatttggattcggttctcagggcttacaatgcaacggcgagcgaggacctggtagaagcgaacaactgcgtctttgatgccaatgtgatcggtgataacactgctgaaggctatgttcttaaaccgtgtttccccaaatggttaccgaatgggacgcgtgtggcgatcaaatgcaagaactccaaattcagcgagaagaagaaaagtgacaaaccgatcaagacacaagtcccactgacggaaattgataagaatctgctggacgtattggcctgttacgtcactttaaaccgcgtgaacaacgtgatctctaagattggaacagtgacgccgaaagattttggcaaagtaatgggtctgactgttcaggatattctggaagaaacgtcacgtgagggtattgttctgacgacatcggacaatcctaatctcgtcaagaaagaacttgttcgcatggtgcaggatgtattacgtcccgcatggatcgaactggtgtcg

SEQ ID NO: 36 - protein, 343 aa, synthetic construct
  REGION 1..343: note = variant of RNA ligase 2 from Escherichia phage RB69 (Bacteriophage RB69)
MHHHHHHGGSGMFKKYSSLENHYNSKFIEKLYTNGLTTGVWVAREKIHGTNFSLIIERDNVTCAKRTGPILPAEDFYGYEIVLKKYDKAIKTVQKFMYTARAVSYQVFGEFAGGGIQKGVDYGEKDFYVFDILINTESGDNTYLTDYEMQDFCNEFGFKMAPMLGRGTFDSLIMIPNDLDSVLRAYNATASEDLVEANNCVFDANVIGDNTAEGYVLKPCFPKWLPNGTRVAIKCKNSKFSEKKKSDKPIKTQVPLTEIDKNLLDVLACYVTLNRVNNVISKIGTVTPKDFGKVMGLTVQDILEETSREGIVLTTSDNPNLVKKELVRMVQDVLRPAWIELVS

SEQ ID NO: 37 - DNA, 1029 bp, synthetic construct
  misc_feature 1..1029: note = variant of RNA ligase 2 from Escherichia phage RB69 (Bacteriophage RB69)
  source 1..1029: mol_type = other DNA
atgcatcaccatcaccatcacggtggcagcggtatgtttaagaaatattctagtctggaaaaccattacaatagcaaattcattgagaaactctataccaacggcttaactactggtgtgtgggttgcgcgcgaaaagatccacgggacgaacttttcgctgattatcgagcgtgataatgtaacatgcgccaaacgtacaggcccgattttgcctgcagaagacttctacggttatgaaatcgtcctgaagaaatacgataaagcgattaagacggtgcagaaatttatgtataccgcccgcgcggtttcctaccaagtgttcggagaatttgctggcggcggtatccagaaaggtgtcgattatggcgagaaagacttctatgtgtttgatattctgatcaatacggaatcaggagactgtacgtacctgactgattatgaaatgcaggacttctgtaatgaatttgggtttaagatggcaccaatgcttggtcgcggcacattcgatagcctgattatgattccgaacgatttggattcggttctcgccgcttacaatgcaacggcgagcgaggacctggtagaagcgaacaactgcgtctttgatgccaatgtgatcggtgataacactgctgaaggctatgttcttaaaccgtgtttccccaaatggttaccgaatgggacgcgtgtggcgatcaaatgcaagaactccaaattcagcgagaagaagaaaagtgacaaaccgatcaagacacaagtcccactgacggaaattgataagaatctgctggacgtattggcctgttacgtcactttaaaccgcgtgaacaacgtgatctctaagattggaacagtgacgccgaaagattttggcaaagtaatgggtctgactgttcaggatattctggaagaaacgtcacgtgagggtattgttctgacgacatcggacaatcctaatctcgtcaagaaagaacttgttcgcatggtgcaggatgtattacgtcccgcatggatcgaactggtgtcg

SEQ ID NO: 38 - protein, 343 aa, synthetic construct
  REGION 1..343: note = variant of RNA ligase 2 from Escherichia phage RB69 (Bacteriophage RB69)
MHHHHHHGGSGMFKKYSSLENHYNSKFIEKLYTNGLTTGVWVAREKIHGTNFSLIIERDNVTCAKRTGPILPAEDFYGYEIVLKKYDKAIKTVQKFMYTARAVSYQVFGEFAGGGIQKGVDYGEKDFYVFDILINTESGDCTYLTDYEMQDFCNEFGFKMAPMLGRGTFDSLIMIPNDLDSVLAAYNATASEDLVEANNCVFDANVIGDNTAEGYVLKPCFPKWLPNGTRVAIKCKNSKFSEKKKSDKPIKTQVPLTEIDKNLLDVLACYVTLNRVNNVISKIGTVTPKDFGKVMGLTVQDILEETSREGIVLTTSDNPNLVKKELVRMVQDVLRPAWIELVS

SEQ ID NO: 39 - DNA, 1029 bp, synthetic construct
  misc_feature 1..1029: note = variant of RNA ligase 2 from Escherichia phage RB69 (Bacteriophage RB69)
  source 1..1029: mol_type = other DNA
atgcatcaccatcaccatcacggtggcagcggtatgtttaagaaatattctagtctggaaaaccattacaatagcaaattcattgagaaactctataccaacggcttaactactggtgtgtgggttgcgcgcgaaaagatccacgggacgaacttttcgctgattatcgagcgtgatcgtgtaacatgcgccaaacgtacaggcccgattttgcctgcagaagacttctacggttatgaaatcgtcctgaagaaatacgataaagcgattaagacggtgcagaaatttatgtataccgcccgcgcggtttcctaccaagtgttcggagaatttgctggcggcggtatccagaaaggtgtcgattatggcgagaaagacttctatgtgtttgatattctgatcaatacggaatcaggagacaacacgtacctgactgattatgaaatgcaggacttctgtaatgaatttgggtttaagatggcaccaatgcttggtcgcggcacattcgatagcctgattatgattccgaacgatttggattcggttctcgccgcttacaatgcaacggcgagcgaggacctggtagaagcgaacaactgcgtctttgatgccaatgtgatcggtgataacactgctgaaggctatgttcttaaaccgtgtttccccaaatggttaccgaatgggacgcgtgtggcgatcaaatgcaagaactccaaattcagcgagaagaagaaaagtgacaaaccgatcaagacacaagtcccactgacggaaattgataagaatctgctggacgtattggcctgttacgtcactttaaaccgcgtgaacaacgtgatctctaagattggaacagtgacgccgaaagattttggcaaagtaatgggtctgactgttcaggatattctggaagaaacgtcacgtgagggtattgttctgacgacatcggacaatcctaatctcgtcaagaaagaacttgttcgcatggtgcaggatgtattacgtcccgcatggatcgaactggtgtcg

SEQ ID NO: 40 - protein, 343 aa, synthetic construct
  REGION 1..343: note = variant of RNA ligase 2 from Escherichia phage RB69 (Bacteriophage RB69)
MHHHHHHGGSGMFKKYSSLENHYNSKFIEKLYTNGLTTGVWVAREKIHGTNFSLIIERDRVTCAKRTGPILPAEDFYGYEIVLKKYDKAIKTVQKFMYTARAVSYQVFGEFAGGGIQKGVDYGEKDFYVFDILINTESGDNTYLTDYEMQDFCNEFGFKMAPMLGRGTFDSLIMIPNDLDSVLAAYNATASEDLVEANNCVFDANVIGDNTAEGYVLKPCFPKWLPNGTRVAIKCKNSKFSEKKKSDKPIKTQVPLTEIDKNLLDVLACYVTLNRVNNVISKIGTVTPKDFGKVMGLTVQDILEETSREGIVLTTSDNPNLVKKELVRMVQDVLRPAWIELVS

SEQ ID NO: 41 - DNA, 1029 bp, synthetic construct
  misc_feature 1..1029: note = variant of RNA ligase 2 from Escherichia phage RB69 (Bacteriophage RB69)
  source 1..1029: mol_type = other DNA
atgcatcaccatcaccatcacggtggcagcggtatgtttaagaaatattctagtctggaaaaccattacaatagcaaattcattgagaaactctataccaacggcttaactactggtgtgtgggttgcgcgcgaaaagatccacgggacgaacttttcgctgattatcgagcgtgataatgtaacatgcgccaaacgtacaggcccgattttgcctgcagaagacttctacggttatgaaatcgtcctgaagaaatacgataaagcgattaagacggtgcagaaatttatgtataccgcccgcgcggtttcctaccaagtgttcggagaatttgctggcggcggtatccagaaaggtgtcgattatggcgagaaagacttctatgtgtttgatattctgatcaatacggaatcaggagacaacacgtacctgactgattatgaaatgcaggacttctgtaatgaatttgggtttaagatggcaccaatgcttggtcgcggcacattcgatagcctgattatgattccgaacgatttggattcggttctcttggcttacaatgcaacggcgagcgaggacctggtagaagcgaacaactgcgtctttgatgccaatgtgatcggtgataacactgctgaaggctatgttcttaaaccgtgtttccccaaatggttaccgaatgggacgcgtgtggcgatcaaatgcaagaactccaaattcagcgagaagaagaaaagtgacaaaccgatcaagacacaagtcccactgacggaaattgataagaatctgctggacgtattggcctgttacgtcactttaaaccgcgtgaacaacgtgatctctaagattggaacagtgacgccgaaagattttggcaaagtaatgggtctgactgttcaggatattctggaagaaacgtcacgtgagggtattgttctgacgacatcggacaatcctaatctcgtcaagaaagaacttgttcgcatggtgcaggatgtattacgtcccgcatggatcgaactggtgtcg

SEQ ID NO: 42 - protein, 343 aa, synthetic construct
  REGION 1..343: note = variant of RNA ligase 2 from Escherichia phage RB69 (Bacteriophage RB69)
MHHHHHHGGSGMFKKYSSLENHYNSKFIEKLYTNGLTTGVWVAREKIHGTNFSLIIERDNVTCAKRTGPILPAEDFYGYEIVLKKYDKAIKTVQKFMYTARAVSYQVFGEFAGGGIQKGVDYGEKDFYVFDILINTESGDNTYLTDYEMQDFCNEFGFKMAPMLGRGTFDSLIMIPNDLDSVLLAYNATASEDLVEANNCVFDANVIGDNTAEGYVLKPCFPKWLPNGTRVAIKCKNSKFSEKKKSDKPIKTQVPLTEIDKNLLDVLACYVTLNRVNNVISKIGTVTPKDFGKVMGLTVQDILEETSREGIVLTTSDNPNLVKKELVRMVQDVLRPAWIELVS

SEQ ID NO: 43 - DNA, 1029 bp, synthetic construct
  misc_feature 1..1029: note = variant of RNA ligase 2 from Escherichia phage RB69 (Bacteriophage RB69)
  source 1..1029: mol_type = other DNA
atgcatcaccatcaccatcacggtggcagcggtatgtttaagaaatattctagtctggaaaaccattacaatagcaaattcattgagaaactctataccaacggcttaactactggtgtgtgggttgcgcgcgaaaagatccacgggacgaacttttcgctgattatcgagcgtgataatgtaacatgcgccaaacgtacaggcccgattttgcctgcagaagacttctacggttatgaaatcgtcctgaagaaatacgataaagcgattaagacggtgcagaaatttatgaggaccgcccgcgcggtttcctaccaagtgttcggagaatttgctggcggcggtatccagaaaggtgtcgattatggcgagaaagacttctatgtgtttgatattctgatcaatacggaatcaggagacaacacgtacctgactgattatgaaatgcaggacttctgtaatgaatttgggtttaagatggcaccaatgcttggtcgcggcacattcgatagcctgattatgattccgaacgatttggattcggttctcgccgcttacaatgcaacggcgagcgaggacctggtagaagcgaacaactgcgtctttgatgccaatgtgatcggtgataacactgctgaaggctatgttcttaaaccgtgtttccccaaatggttaccgaatgggacgcgtgtggcgatcaaatgcaagaactccaaattcagcgagaagaagaaaagtgacaaaccgatcaagacacaagtcccactgacggaaattgataagaatctgctggacgtattggcctgttacgtcactttaaaccgcgtgaacaacgtgatctctaagattggaacagtgacgccgaaagattttggcaaagtaatgggtctgactgttcaggatattctggaagaaacgtcacgtgagggtattgttctgacgacatcggacaatcctaatctcgtcaagaaagaacttgttcgcatggtgcaggatgtattacgtcccgcatggatcgaactggtgtcg

SEQ ID NO: 44 - protein, 343 aa, synthetic construct
  REGION 1..343: note = variant of RNA ligase 2 from Escherichia phage RB69 (Bacteriophage RB69)
MHHHHHHGGSGMFKKYSSLENHYNSKFIEKLYTNGLTTGVWVAREKIHGTNFSLIIERDNVTCAKRTGPILPAEDFYGYEIVLKKYDKAIKTVQKFMRTARAVSYQVFGEFAGGGIQKGVDYGEKDFYVFDILINTESGDNTYLTDYEMQDFCNEFGFKMAPMLGRGTFDSLIMIPNDLDSVLAAYNATASEDLVEANNCVFDANVIGDNTAEGYVLKPCFPKWLPNGTRVAIKCKNSKFSEKKKSDKPIKTQVPLTEIDKNLLDVLACYVTLNRVNNVISKIGTVTPKDFGKVMGLTVQDILEETSREGIVLTTSDNPNLVKKELVRMVQDVLRPAWIELVS

SEQ ID NO: 45 - DNA, 1029 bp, synthetic construct
  misc_feature 1..1029: note = variant of RNA ligase 2 from Escherichia phage RB69 (Bacteriophage RB69)
  source 1..1029: mol_type = other DNA
atgcatcaccatcaccatcacggtggcagcggtatgtttaagaaatattctagtctggaaaaccattacaatagcaaattcattgagaaactctataccaacggcttaactactggtgtgtgggttgcgcgcgaaaagatccacgggacgaacttttcgctgattatcgagcgtgataatgtaacatgcgccaaacgtacaggcccgattttgcctgcagaagacttctacggttatgaaatcgtcctgaagaaatacgataaagcgattaagacggtgcagaaatcgatgtataccgcccgcgcggtttcctaccaagtgttcggagaatttgctggcggcggtatccagaaaggtgtcgattatggcgagaaagacttctatgtgtttgatattctgatcaatacggaatcaggagacaacacgtacctgactgattatgaaatgcaggacttctgtaatgaatttgggtttaagatggcaccaatgcttggtcgcggcacattcgatagcctgattatgattccgaacgatttggattcggttctcgccgcttacaatgcaacggcgagcgaggacctggtagaagcgaacaactgcgtctttgatgccaatgtgatcggtgataacactgctgaaggctatgttcttaaaccgtgtttccccaaatggttaccgaatgggacgcgtgtggcgatcaaatgcaagaactccaaattcagcgagaagaagaaaagtgacaaaccgatcaagacacaagtcccactgacggaaattgataagaatctgctggacgtattggcctgttacgtcactttaaaccgcgtgaacaacgtgatctctaagattggaacagtgacgccgaaagattttggcaaagtaatgggtctgactgttcaggatattctggaagaaacgtcacgtgagggtattgttctgacgacatcggacaatcctaatctcgtcaagaaagaacttgttcgcatggtgcaggatgtattacgtcccgcatggatcgaactggtgtcg

SEQ ID NO: 46 - protein, 343 aa, synthetic construct
  REGION 1..343: note = variant of RNA ligase 2 from Escherichia phage RB69 (Bacteriophage RB69)
MHHHHHHGGSGMFKKYSSLENHYNSKFIEKLYTNGLTTGVWVAREKIHGTNFSLIIERDNVTCAKRTGPILPAEDFYGYEIVLKKYDKAIKTVQKSMYTARAVSYQVFGEFAGGGIQKGVDYGEKDFYVFDILINTESGDNTYLTDYEMQDFCNEFGFKMAPMLGRGTFDSLIMIPNDLDSVLAAYNATASEDLVEANNCVFDANVIGDNTAEGYVLKPCFPKWLPNGTRVAIKCKNSKFSEKKKSDKPIKTQVPLTEIDKNLLDVLACYVTLNRVNNVISKIGTVTPKDFGKVMGLTVQDILEETSREGIVLTTSDNPNLVKKELVRMVQDVLRPAWIELVS

SEQ ID NO: 47 - DNA, 1029 bp, synthetic construct
  misc_feature 1..1029: note = variant of RNA ligase 2 from Escherichia phage RB69 (Bacteriophage RB69)
  source 1..1029: mol_type = other DNA
atgcatcaccatcaccatcacggtggcagcggtatgtttaagaaatattctagtctggaaaaccattacaatagcaaattcattgagaaactctataccaacggcttaactactggtgtgtgggttgcgcgcgaaaagatccacgggacgaacttttcgctgattatcgagcgtgataatgtaacatgcgccaaacgtacaggcccgattttgcctgcagaagacttctacggttatgaaatcgtcctgaagaaatacgataaagcgattaagacggtgcagaaatttatgtataccgcccgcgcggtttcctaccaagtgttcggagaatttgctggcggcggtatccagaaaggtgtcgattatggcgagaaagacttctatgtgtttgatattctgatcaatacggaatcaggagacaacacgtacctgactgattatgaaatgcaggacttctgtaatgaatttgggtttaagatggcaccaatgcttggtcgcggcacattcgatagcctgattatgattccgaacgatttggattcggttctcgccgcttacaatgcaacggcgagcgaggacctggtagaagcgaacaactgcgtctttgatgccgtggtgatcggtgataacactgctgaaggctatgttcttaaaccgtgtttccccaaatggttaccgaatgggacgcgtgtggcgatcaaatgcaagaactccaaattcagcgagaagaagaaaagtgacaaaccgatcaagacacaagtcccactgacggaaattgataagaatctgctggacgtattggcctgttacgtcactttaaaccgcgtgaacaacgtgatctctaagattggaacagtgacgccgaaagattttggcaaagtaatgggtctgactgttcaggatattctggaagaaacgtcacgtgagggtattgttctgacgacatcggacaatcctaatctcgtcaagaaagaacttgttcgcatggtgcaggatgtattacgtcccgcatggatcgaactggtgtcg

SEQ ID NO: 48 - protein, 343 aa, synthetic construct
  REGION 1..343: note = variant of RNA ligase 2 from Escherichia phage RB69 (Bacteriophage RB69)
MHHHHHHGGSGMFKKYSSLENHYNSKFIEKLYTNGLTTGVWVAREKIHGTNFSLIIERDNVTCAKRTGPILPAEDFYGYEIVLKKYDKAIKTVQKFMYTARAVSYQVFGEFAGGGIQKGVDYGEKDFYVFDILINTESGDNTYLTDYEMQDFCNEFGFKMAPMLGRGTFDSLIMIPNDLDSVLAAYNATASEDLVEANNCVFDAVVIGDNTAEGYVLKPCFPKWLPNGTRVAIKCKNSKFSEKKKSDKPIKTQVPLTEIDKNLLDVLACYVTLNRVNNVISKIGTVTPKDFGKVMGLTVQDILEETSREGIVLTTSDNPNLVKKELVRMVQDVLRPAWIELVS

SEQ ID NO: 49 - DNA, 1029 bp, synthetic construct
  misc_feature 1..1029: note = variant of RNA ligase 2 from Escherichia phage RB69 (Bacteriophage RB69)
  source 1..1029: mol_type = other DNA
atgcatcaccatcaccatcacggtggcagcggtatgtttaagaaatattctagtctggaaaaccattacaatagcaaattcattgagaaactctataccaacggcttaactactggtgtgtgggttgcgcgcgaaaagatccacgggacgaacttttcgctgattatcgagcgtgataatgtaacatgcgccaaacgtacaggcccgattttgcctgcagaagacttctacggttatgaaatcgtcctgaagaaatacgataaagcgattaagacggtgcagaaatttatgtataccgcccgcgcggtttcctaccaagtgttcggagaatttgctggcggcggtatccagaaaggtgtcgattatggcgagaaagacttctatgtgtttgatattctgatcaatacggaatcaggagacaacacgtacctgactgattatgaaatgcaggacttctgtaatgaatttgggtttaagatggcaccaatgcttggtcgcggcacattcgatagcctgattatgattccgaacgatttggattcggttctcgccgcttacaatgcaacggcgaaggaggacctggtagaagcgaacaactgcgtctttgatgccaatgtgatcggtgataacactgctgaaggctatgttcttaaaccgtgtttccccaaatggttaccgaatgggacgcgtgtggcgatcaaatgcaagaactccaaattcagcgagaagaagaaaagtgacaaaccgatcaagacacaagtcccactgacggaaattgataagaatctgctggacgtattggcctgttacgtcactttaaaccgcgtgaacaacgtgatctctaagattggaacagtgacgccgaaagattttggcaaagtaatgggtctgactgttcaggatattctggaagaaacgtcacgtgagggtattgttctgacgacatcggacaatcctaatctcgtcaagaaagaacttgttcgcatggtgcaggatgtattacgtcccgcatggatcgaactggtgtcg

SEQ ID NO: 50 - protein, 343 aa, synthetic construct
  REGION 1..343: note = variant of RNA ligase 2 from Escherichia phage RB69 (Bacteriophage RB69)
MHHHHHHGGSGMFKKYSSLENHYNSKFIEKLYTNGLTTGVWVAREKIHGTNFSLIIERDNVTCAKRTGPILPAEDFYGYEIVLKKYDKAIKTVQKFMYTARAVSYQVFGEFAGGGIQKGVDYGEKDFYVFDILINTESGDNTYLTDYEMQDFCNEFGFKMAPMLGRGTFDSLIMIPNDLDSVLAAYNATAKEDLVEANNCVFDANVIGDNTAEGYVLKPCFPKWLPNGTRVAIKCKNSKFSEKKKSDKPIKTQVPLTEIDKNLLDVLACYVTLNRVNNVISKIGTVTPKDFGKVMGLTVQDILEETSREGIVLTTSDNPNLVKKELVRMVQDVLRPAWIELVS

SEQ ID NO: 51 - DNA, 1029 bp, synthetic construct
  misc_feature 1..1029: note = variant of RNA ligase 2 from Escherichia phage RB69 (Bacteriophage RB69)
  source 1..1029: mol_type = other DNA
atgcatcaccatcaccatcacggtggcagcggtatgtttaagaaatattctagtctggaaaaccattacaatagcaaattcattgagaaactctataccaacggcttaactactggtgtgtgggttgcgcgcgaaaagatccacgggacgaacttttcgctgattatcgagcgtgataatgtaacatgcgccaaacgtacaggcccgattttgcctgcagaagacttctacggttatgaaatcgtcctgaagaaatacgataaagcgattaagacggtgcagaaatttatgtataccgcccgcgcggtttcctaccaagtgttcggagaatttgctggcggcggtatccagaaaggtgtcgattatggcgagaaagacttctatgtgtttgatattctgatcaatacggaatcaggagacaacacgtacctgactgattatgaaatgcaggacttctgtaatgaatttgggtttaagatggcaccaatgcttggtcgcggcacattcgatagcctgattatgattccgaacgatttggattcggttctcgccgcttacaatgcaacggcgagcgagaatctggtagaagcgaacaactgcgtctttgatgccaatgtgatcggtgataacactgctgaaggctatgttcttaaaccgtgtttccccaaatggttaccgaatgggacgcgtgtggcgatcaaatgcaagaactccaaattcagcgagaagaagaaaagtgacaaaccgatcaagacacaagtcccactgacggaaattgataagaatctgctggacgtattggcctgttacgtcactttaaaccgcgtgaacaacgtgatctctaagattggaacagtgacgccgaaagattttggcaaagtaatgggtctgactgttcaggatattctggaagaaacgtcacgtgagggtattgttctgacgacatcggacaatcctaatctcgtcaagaaagaacttgttcgcatggtgcaggatgtattacgtcccgcatggatcgaactggtgtcg

SEQ ID NO: 52 - protein, 343 aa, synthetic construct
  REGION 1..343: note = variant of RNA ligase 2 from Escherichia phage RB69 (Bacteriophage RB69)
MHHHHHHGGSGMFKKYSSLENHYNSKFIEKLYTNGLTTGVWVAREKIHGTNFSLIIERDNVTCAKRTGPILPAEDFYGYEIVLKKYDKAIKTVQKFMYTARAVSYQVFGEFAGGGIQKGVDYGEKDFYVFDILINTESGDNTYLTDYEMQDFCNEFGFKMAPMLGRGTFDSLIMIPNDLDSVLAAYNATASENLVEANNCVFDANVIGDNTAEGYVLKPCFPKWLPNGTRVAIKCKNSKFSEKKKSDKPIKTQVPLTEIDKNLLDVLACYVTLNRVNNVISKIGTVTPKDFGKVMGLTVQDILEETSREGIVLTTSDNPNLVKKELVRMVQDVLRPAWIELVS

SEQ ID NO: 53 - DNA, 1029 bp, synthetic construct
  misc_feature 1..1029: note = variant of RNA ligase 2 from Escherichia phage RB69 (Bacteriophage RB69)
  source 1..1029: mol_type = other DNA
atgcatcaccatcaccatcacggtggcagcggtatgtttaagaaatattctagtctggaaaaccattacaatagcaaattcattgagaaactctataccaacggcttaactactggtgtgtgggttgcgcgcgaaaagatccacgggacgaacttttcgctgattatcgagcgtgataatgtaacatgcgccaaacgtacaggcccgattttgcctgcagaagacttctacggttatgaaatcgtcctgaagaaatacgataaagcgattaagacggtgcagaaatttatgtataccgcccgcgcggtttcctaccaagtgttcggagaatttgctggcggcggtatccagaaaggtgtcgattatggcgagaaagacttctatgtgtttgatattctgatcaatacggaatcaggagacgctacgtacctgactgattatgaaatgcaggacttctgtaatgaatttgggtttaagatggcaccaatgcttggtcgcggcacattcgatagcctgattatgattccgaacgatttggattcggttctcgccgcttacaatgcaacggcgagcgaggacctggtagaagcgaacaactgcgtctttgatgccaatgtgatcggtgataacactgctgaaggctatgttcttaaaccgtgtttccccaaatggttaccgaatgggacgcgtgtggcgatcaaatgcaagaactccaaattcagcgagaagaagaaaagtgacaaaccgatcaagacacaagtcccactgacggaaattgataagaatctgctggacgtattggcctgttacgtcactttaaaccgcgtgaacaacgtgatctctaagattggaacagtgacgccgaaagattttggcaaagtaatgggtctgactgttcaggatattctggaagaaacgtcacgtgagggtattgttctgacgacatcggacaatcctaatctcgtcaagaaagaacttgttcgcatggtgcaggatgtattacgtcccgcatggatcgaactggtgtcg

SEQ ID NO: 54 - protein, 343 aa, synthetic construct
  REGION 1..343: note = variant of RNA ligase 2 from Escherichia phage RB69 (Bacteriophage RB69)
MHHHHHHGGSGMFKKYSSLENHYNSKFIEKLYTNGLTTGVWVAREKIHGTNFSLIIERDNVTCAKRTGPILPAEDFYGYEIVLKKYDKAIKTVQKFMYTARAVSYQVFGEFAGGGIQKGVDYGEKDFYVFDILINTESGDATYLTDYEMQDFCNEFGFKMAPMLGRGTFDSLIMIPNDLDSVLAAYNATASEDLVEANNCVFDANVIGDNTAEGYVLKPCFPKWLPNGTRVAIKCKNSKFSEKKKSDKPIKTQVPLTEIDKNLLDVLACYVTLNRVNNVISKIGTVTPKDFGKVMGLTVQDILEETSREGIVLTTSDNPNLVKKELVRMVQDVLRPAWIELVS

SEQ ID NO: 55 - DNA, 1029 bp, synthetic construct
  misc_feature 1..1029: note = variant of RNA ligase 2 from Escherichia phage RB69 (Bacteriophage RB69)
  source 1..1029: mol_type = other DNA
atgcatcaccatcaccatcacggtggcagcggtatgtttaagaaatattctagtctggaaaaccattacaatagcaaattcattgagaaactctataccaacggcttaactactggtgtgtgggttgcgcgcgaaaagatccacgggacgaacttttcgctgattatcgagcgtgataatgtaacatgcgccaaacgtacaggcccgattttgcctgcagaagacttctacggttatgaaatcgtcctgaagaaatacgataaagcgattaagacggtgcagaaatttatgtataccgcccgcgcggtttcctaccaagtgttcggagaatttgctggcggcggtatccagaaaggtgtcgattatggcgagaaagacttctatgtgtttgatattctgatcaatacggaatcaggagacaacacgtacctgactgattatgaaatgcaggacttctgtaatgaatttgggtttaagatggcaccaatgcttggtcgcggcacattcgatagcctgattatgattccgaacgatttggattcggttctcgccgcttacaatgcaacggcgagcgaggacctggtagaagcgaacaactgcgtctttgatgccaatgtgatcggtgataacactgctgaaggctatgttcttaaaccgtgtttccccaaatggttaccgaatgggacgcgtgtggcgatcaaatgcaagaactccaaattcagcgagaagaagaaaagtgacaaaccgatcaagacacaagtcccactgacggaaattgataagaatctgctggacgtattggcctgttacgtcactttaaaccgcgtgaacaacgtgatctctaagattggaacagtgacgccgaaagattttggcaaagtaatgggtctgactgttcaggatattctggaagaaacgtcacgtgagggtattgttctgacgacatcggacaatcctaagctcgtcaagaaagaacttgttcgcatggtgcaggatgtattacgtcccgcatggatcgaactggtgtcg

SEQ ID NO: 56 - protein, 343 aa, synthetic construct
  REGION 1..343: note = variant of RNA ligase 2 from Escherichia phage RB69 (Bacteriophage RB69)
MHHHHHHGGSGMFKKYSSLENHYNSKFIEKLYTNGLTTGVWVAREKIHGTNFSLIIERDNVTCAKRTGPILPAEDFYGYEIVLKKYDKAIKTVQKFMYTARAVSYQVFGEFAGGGIQKGVDYGEKDFYVFDILINTESGDNTYLTDYEMQDFCNEFGFKMAPMLGRGTFDSLIMIPNDLDSVLAAYNATASEDLVEANNCVFDANVIGDNTAEGYVLKPCFPKWLPNGTRVAIKCKNSKFSEKKKSDKPIKTQVPLTEIDKNLLDVLACYVTLNRVNNVISKIGTVTPKDFGKVMGLTVQDILEETSREGIVLTTSDNPKLVKKELVRMVQDVLRPAWIELVS

SEQ ID NO: 57 - DNA, 1029 bp, synthetic construct
  misc_feature 1..1029: note = variant of RNA ligase 2 from Escherichia phage RB69 (Bacteriophage RB69)
  source 1..1029: mol_type = other DNA
atgcatcaccatcaccatcacggtggcagcggtatgtttaagaaatattctagtctggaaaaccattacaatagcaaattcattgagaaactctataccaacggcttaactactggtgtgtgggttgcgcgcgaaaagatccacgggacgaacttttcgctgattatcgagcgtgataatgtaacatgcgccaaacgtacaggcccgattttgcctgcagaagacttctacggttatgaaatcgtcctgaagaaatacgataaagcgattaagacggtgcagaaatttatgtataccgcccgcgcggtttcctaccaagtgttcggagaatttgctggcggcggtatccagaaaggtgtcgattatggcgagaaagacttctatgtgtttgatattctgatcaatacggaatcaggagacaacacgtacctgactgattatgaaatgcaggacttctgtaatgaatttgggtttaagatggcaccaatgcttggtcgcggcacattcgatagcctgattcagattccgaacgatttggattcggttctcgccgcttacaatgcaacggcgagcgaggacctggtagaagcgaacaactgcgtctttgatgccaatgtgatcggtgataacactgctgaaggctatgttcttaaaccgtgtttccccaaatggttaccgaatgggacgcgtgtggcgatcaaatgcaagaactccaaattcagcgagaagaagaaaagtgacaaaccgatcaagacacaagtcccactgacggaaattgataagaatctgctggacgtattggcctgttacgtcactttaaaccgcgtgaacaacgtgatctctaagattggaacagtgacgccgaaagattttggcaaagtaatgggtctgactgttcaggatattctggaagaaacgtcacgtgagggtattgttctgacgacatcggacaatcctaatctcgtcaagaaagaacttgttcgcatggtgcaggatgtattacgtcccgcatggatcgaactggtgtcg

SEQ ID NO: 58 - protein, 343 aa, synthetic construct
  REGION 1..343: note = variant of RNA ligase 2 from Escherichia phage RB69 (Bacteriophage RB69)
MHHHHHHGGSGMFKKYSSLENHYNSKFIEKLYTNGLTTGVWVAREKIHGTNFSLIIERDNVTCAKRTGPILPAEDFYGYEIVLKKYDKAIKTVQKFMYTARAVSYQVFGEFAGGGIQKGVDYGEKDFYVFDILINTESGDNTYLTDYEMQDFCNEFGFKMAPMLGRGTFDSLIQIPNDLDSVLAAYNATASEDLVEANNCVFDANVIGDNTAEGYVLKPCFPKWLPNGTRVAIKCKNSKFSEKKKSDKPIKTQVPLTEIDKNLLDVLACYVTLNRVNNVISKIGTVTPKDFGKVMGLTVQDILEETSREGIVLTTSDNPNLVKKELVRMVQDVLRPAWIELVS

SEQ ID NO: 59 - DNA, 1029 bp, synthetic construct
  misc_feature 1..1029: note = variant of RNA ligase 2 from Escherichia phage RB69 (Bacteriophage RB69)
  source 1..1029: mol_type = other DNA
atgcatcaccatcaccatcacggtggcagcggtatgtttaagaaatattctagtctggaaaaccattacaatagcaaattcattgagaaactctataccaacggcttaactactggtgtgtgggttgcgcgcgaaaagatccacgggacgaacttttcgctgattatcgagcgtgataatgtaacatgcgccaaacgtacaggcccgattttgcctgcagaagacttctacggttatgaaatcgtcctgaagaaatacgataaagcgattaagacggtgcagaaatttatggataccgcccgcgcggtttcctaccaagtgttcggagaatttgctggcggcggtatccagaaaggtgtcgattatggcgagaaagacttctatgtgtttgatattctgatcaatacggaatcaggagacaacacgtacctgactgattatgaaatgcaggacttctgtaatgaatttgggtttaagatggcaccaatgcttggtcgcggcacattcgatagcctgattatgattccgaacgatttggattcggttctcgccgcttacaatgcaacggcgagcgaggacctggtagaagcgaacaactgcgtctttgatgccaatgtgatcggtgataacactgctgaaggctatgttcttaaaccgtgtttccccaaatggttaccgaatgggacgcgtgtggcgatcaaatgcaagaactccaaattcagcgagaagaagaaaagtgacaaaccgatcaagacacaagtcccactgacggaaattgataagaatctgctggacgtattggcctgttacgtcactttaaaccgcgtgaacaacgtgatctctaagattggaacagtgacgccgaaagattttggcaaagtaatgggtctgactgttcaggatattctggaagaaacgtcacgtgagggtattgttctgacgacatcggacaatcctaatctcgtcaagaaagaacttgttcgcatggtgcaggatgtattacgtcccgcatggatcgaactggtgtcg

SEQ ID NO: 60 - protein, 343 aa, synthetic construct
  REGION 1..343: note = variant of RNA ligase 2 from Escherichia phage RB69 (Bacteriophage RB69)
MHHHHHHGGSGMFKKYSSLENHYNSKFIEKLYTNGLTTGVWVAREKIHGTNFSLIIERDNVTCAKRTGPILPAEDFYGYEIVLKKYDKAIKTVQKFMDTARAVSYQVFGEFAGGGIQKGVDYGEKDFYVFDILINTESGDNTYLTDYEMQDFCNEFGFKMAPMLGRGTFDSLIMIPNDLDSVLAAYNATASEDLVEANNCVFDANVIGDNTAEGYVLKPCFPKWLPNGTRVAIKCKNSKFSEKKKSDKPIKTQVPLTEIDKNLLDVLACYVTLNRVNNVISKIGTVTPKDFGKVMGLTVQDILEETSREGIVLTTSDNPNLVKKELVRMVQDVLRPAWIELVS

SEQ ID NO: 61 - DNA, 1029 bp, synthetic construct
  misc_feature 1..1029: note = variant of RNA ligase 2 from Escherichia phage RB69 (Bacteriophage RB69)
  source 1..1029: mol_type = other DNA
atgcatcaccatcaccatcacggtggcagcggtatgtttaagaaatattctagtctggaaaaccattacaatagcaaattcattgagaaactctataccaacggcttaactactggtgtgtgggttgcgcgcgaaaagatccacgggacgaacttttcgctgattatcgagcgtgataatgtaacatgcgccaaacgtacaggcccgattaaacctgcagaagacttctacggttatgaaatcgtcctgaagaaatacgataaagcgattaagacggtgcagaaatttatgtataccgcccgcgcggtttcctaccaagtgttcggagaatttgctggcggcggtatccagaaaggtgtcgattatggcgagaaagacttctatgtgtttgatattctgatcaatacggaatcaggagacaacacgtacctgactgattatgaaatgcaggacttctgtaatgaatttgggtttaagatggcaccaatgcttggtcgcggcacattcgatagcctgattatgattccgaacgatttggattcggttctcgccgcttacaatgcaacggcgagcgaggacctggtagaagcgaacaactgcgtctttgatgccaatgtgatcggtgataacactgctgaaggctatgttcttaaaccgtgtttccccaaatggttaccgaatgggacgcgtgtggcgatcaaatgcaagaactccaaattcagcgagaagaagaaaagtgacaaaccgatcaagacacaagtcccactgacggaaattgataagaatctgctggacgtattggcctgttacgtcactttaaaccgcgtgaacaacgtgatctctaagattggaacagtgacgccgaaagattttggcaaagtaatgggtctgactgttcaggatattctggaagaaacgtcacgtgagggtattgttctgacgacatcggacaatcctaatctcgtcaagaaagaacttgttcgcatggtgcaggatgtattacgtcccgcatggatcgaactggtgtcg

SEQ ID NO: 62 - protein, 343 aa, synthetic construct
  REGION 1..343: note = variant of RNA ligase 2 from Escherichia phage RB69 (Bacteriophage RB69)
MHHHHHHGGSGMFKKYSSLENHYNSKFIEKLYTNGLTTGVWVAREKIHGTNFSLIIERDNVTCAKRTGPIKPAEDFYGYEIVLKKYDKAIKTVQKFMYTARAVSYQVFGEFAGGGIQKGVDYGEKDFYVFDILINTESGDNTYLTDYEMQDFCNEFGFKMAPMLGRGTFDSLIMIPNDLDSVLAAYNATASEDLVEANNCVFDANVIGDNTAEGYVLKPCFPKWLPNGTRVAIKCKNSKFSEKKKSDKPIKTQVPLTEIDKNLLDVLACYVTLNRVNNVISKIGTVTPKDFGKVMGLTVQDILEETSREGIVLTTSDNPNLVKKELVRMVQDVLRPAWIELVS

SEQ ID NO: 63 - DNA, 1029 bp, synthetic construct
  misc_feature 1..1029: note = variant of RNA ligase 2 from Escherichia phage RB69 (Bacteriophage RB69)
  source 1..1029: mol_type = other DNA
atgcatcaccatcaccatcacggtggcagcggtatgtttaagaaatattctagtctggaaaaccattacaatagcaaattcattgagaaactctataccaacggcttaactactggtgtgtgggttgcgcgcgaaaagatccacgggacgaacttttcgctgattatcgagcgtgataatgtaacatgcgccaaacgtacaggcccgattttgcctgcagaagacttctacggttatgaaatcgtcctgaagaaatacgataaagcgattaagacggtgcagaaatttatgtataccgcccgcgcggtttcctaccaagtgttcggagaatttgctggcggcggtatccagaaaggtgtcgattatggcgagaaagacttctatgtgtttgatattctgatcaatacggaatcaggagacaaccggtacctgactgattatgaaatgcaggacttctgtaatgaatttgggtttaagatggcaccaatgcttggtcgcggcacattcgatagcctgattatgattccgaacgatttggattcggttctcgccgcttacaatgcaacggcgagcgaggacctggtagaagcgaacaactgcgtctttgatgccaatgtgatcggtgataacactgctgaaggctatgttcttaaaccgtgtttccccaaatggttaccgaatgggacgcgtgtggcgatcaaatgcaagaactccaaattcagcgagaagaagaaaagtgacaaaccgatcaagacacaagtcccactgacggaaattgataagaatctgctggacgtattggcctgttacgtcactttaaaccgcgtgaacaacgtgatctctaagattggaacagtgacgccgaaagattttggcaaagtaatgggtctgactgttcaggatattctggaagaaacgtcacgtgagggtattgttctgacgacatcggacaatcctaatctcgtcaagaaagaacttgttcgcatggtgcaggatgtattacgtcccgcatggatcgaactggtgtcg

SEQ ID NO: 64 - protein, 343 aa, synthetic construct
  REGION 1..343: note = variant of RNA ligase 2 from Escherichia phage RB69 (Bacteriophage RB69)
MHHHHHHGGSGMFKKYSSLENHYNSKFIEKLYTNGLTTGVWVAREKIHGTNFSLIIERDNVTCAKRTGPILPAEDFYGYEIVLKKYDKAIKTVQKFMYTARAVSYQVFGEFAGGGIQKGVDYGEKDFYVFDILINTESGDNRYLTDYEMQDFCNEFGFKMAPMLGRGTFDSLIMIPNDLDSVLAAYNATASEDLVEANNCVFDANVIGDNTAEGYVLKPCFPKWLPNGTRVAIKCKNSKFSEKKKSDKPIKTQVPLTEIDKNLLDVLACYVTLNRVNNVISKIGTVTPKDFGKVMGLTVQDILEETSREGIVLTTSDNPNLVKKELVRMVQDVLRPAWIELVS

SEQ ID NO: 65 - DNA, 1029 bp, synthetic construct
  misc_feature 1..1029: note = variant of RNA ligase 2 from Escherichia phage RB69 (Bacteriophage RB69)
  source 1..1029: mol_type = other DNA
atgcatcaccatcaccatcacggtggcagcggtatgtttaagaaatattctagtctggaaaaccattacaatagcaaattcattgagaaactctataccaacggcttaactactggtgtgtgggttgcgcgcgaaaagatccacgggacgaacttttcgctgattatcacccgtgataatgtaacatgcgccaaacgtacaggcccgattttgcctgcagaagacttctacggttatgaaatcgtcctgaagaaatacgataaagcgattaagacggtgcagaaatttatgtataccgcccgcgcggtttcctaccaagtgttcggagaatttgctggcggcggtatccagaaaggtgtcgattatggcgagaaagacttctatgtgtttgatattctgatcaatacggaatcaggagacaacacgtacctgactgattatgaaatgcaggacttctgtaatgaatttgggtttaagatggcaccaatgcttggtcgcggcacattcgatagcctgattatgattccgaacgatttggattcggttctcgccgcttacaatgcaacggcgagcgaggacctggtagaagcgaacaactgcgtctttgatgccaatgtgatcggtgataacactgctgaaggctatgttcttaaaccgtgtttccccaaatggttaccgaatgggacgcgtgtggcgatcaaatgcaagaactccaaattcagcgagaagaagaaaagtgacaaaccgatcaagacacaagtcccactgacggaaattgataagaatctgctggacgtattggcctgttacgtcactttaaaccgcgtgaacaacgtgatctctaagattggaacagtgacgccgaaagattttggcaaagtaatgggtctgactgttcaggatattctggaagaaacgtcacgtgagggtattgttctgacgacatcggacaatcctaatctcgtcaagaaagaacttgttcgcatggtgcaggatgtattacgtcccgcatggatcgaactggtgtcg

SEQ ID NO: 66 - protein, 343 aa, synthetic construct
  REGION 1..343: note = variant of RNA ligase 2 from Escherichia phage RB69 (Bacteriophage RB69)
MHHHHHHGGSGMFKKYSSLENHYNSKFIEKLYTNGLTTGVWVAREKIHGTNFSLIITRDNVTCAKRTGPILPAEDFYGYEIVLKKYDKAIKTVQKFMYTARAVSYQVFGEFAGGGIQKGVDYGEKDFYVFDILINTESGDNTYLTDYEMQDFCNEFGFKMAPMLGRGTFDSLIMIPNDLDSVLAAYNATASEDLVEANNCVFDANVIGDNTAEGYVLKPCFPKWLPNGTRVAIKCKNSKFSEKKKSDKPIKTQVPLTEIDKNLLDVLACYVTLNRVNNVISKIGTVTPKDFGKVMGLTVQDILEETSREGIVLTTSDNPNLVKKELVRMVQDVLRPAWIELVS

SEQ ID NO: 67 - DNA, 1029 bp, synthetic construct
  misc_feature 1..1029: note = variant of RNA ligase 2 from Escherichia phage RB69 (Bacteriophage RB69)
  source 1..1029: mol_type = other DNA
atgcatcaccatcaccatcacggtggcagcggtatgtttaagaaatattctagtctggaaaaccattacaatagcaaattcattgagaaactctataccaacggcttaactactggtgtgtgggttgcgcgcgaaaagatccacgggacgaacttttcgctgattatcgagcgtgataatgtaacatgcgccaaacgtacaggcccgattttgcctgcagaagacttctacggttatgaaatcgtcctgaagaaatacgataaagcgattaagacggtgcagaaatttatgtataccgcccgcgcggtttcctaccaagtgttcggagaatttgctggcggcggtatccagaaaggtgtcgattatggcgagaaagacttctatgtgtttgatattctgatcaatacggaatcaggagacaacacgtacctgactgattatgaaatgcaggacttctgtaatgaatttgggtttaagatggcaccaatgcttggtcgcggcacattcgatagcctgattatgattccgaacgatttggattcggttctcgccgcttacaatgcaacggcgagcgaggacctggtagaagcgaacaactgcgtctttgatgccaatgtgatcggtgataacactgctgaaggctatgttcttaaaccgtgtttccccaaatggttaccgaatgggacgcgtgtggcgatcaaatgcaagaactccaaattcagcgagaagaagaaaagtgacaaaccgatcaagacacaagtcccactgacggaaattgataagaatctgctggacgtattggcctgttacgtcactttaaaccgcgtgaacaacgtgatctctaagattggaacagtgacgccgaaagattttggcaaagtaatgggtctgactgttcaggatattctggaagaaacgtcacgtgagggtattgttctgacgacatcggacaatcctgatctcgtcaagaaagaacttgttcgcatggtgcaggatgtattacgtcccgcatggatcgaactggtgtcg

SEQ ID NO: 68 - protein, 343 aa, synthetic construct
  REGION 1..343: note = variant of RNA ligase 2 from Escherichia phage RB69 (Bacteriophage RB69)
MHHHHHHGGSGMFKKYSSLENHYNSKFIEKLYTNGLTTGVWVAREKIHGTNFSLIIERDNVTCAKRTGPILPAEDFYGYEIVLKKYDKAIKTVQKFMYTARAVSYQVFGEFAGGGIQKGVDYGEKDFYVFDILINTESGDNTYLTDYEMQDFCNEFGFKMAPMLGRGTFDSLIMIPNDLDSVLAAYNATASEDLVEANNCVFDANVIGDNTAEGYVLKPCFPKWLPNGTRVAIKCKNSKFSEKKKSDKPIKTQVPLTEIDKNLLDVLACYVTLNRVNNVISKIGTVTPKDFGKVMGLTVQDILEETSREGIVLTTSDNPDLVKKELVRMVQDVLRPAWIELVS

SEQ ID NO: 69 - DNA, 1029 bp, synthetic construct
  misc_feature 1..1029: note = variant of RNA ligase 2 from Escherichia phage RB69 (Bacteriophage RB69)
  source 1..1029: mol_type = other DNA
atgcatcaccatcaccatcacggtggcagcggtatgtttaagaaatattctagtctggaaaaccattacaatagcaaattcattgagaaactctataccaacggcttaactactggtgtgtgggttgcgcgcgaaaagatccacgggacgaacttttcgctgattatcgagcgtgataatgtaacatgcgccaaacgtacaggcccgattttgcctgcagaagacttctacggttatgaaatcgtcctgaagaaatacgataaagcgattaagacggtgcagaaatttatgtataccgcccgcgcggtttcctaccaagtgttcggagaatttgctggcggcggtatccagaaaggtgtcgattatggcgagaaagacttctatgtgtttgatattctgatcaatacggaatcaggagacaacacgtacctgactgattatgaaatgcaggacttctgtaatgaatttgggtttaagatggcaccaatgcttggtcgcggcacattcgatagcctgattatgattccgaacgatttggattcggttctcgccgcttacaatgcaacggcgagcgaggacctggtagaagcgaacaactgcgtctttgatgccagggtgatcggtgataacactgctgaaggctatgttcttaaaccgtgtttccccaaatggttaccgaatgggacgcgtgtggcgatcaaatgcaagaactccaaattcagcgagaagaagaaaagtgacaaaccgatcaagacacaagtcccactgacggaaattgataagaatctgctggacgtattggcctgttacgtcactttaaaccgcgtgaacaacgtgatctctaagattggaacagtgacgccgaaagattttggcaaagtaatgggtctgactgttcaggatattctggaagaaacgtcacgtgagggtattgttctgacgacatcggacaatcctaatctcgtcaagaaagaacttgttcgcatggtgcaggatgtattacgtcccgcatggatcgaactggtgtcg

SEQ ID NO: 70 - protein, 343 aa, synthetic construct
  REGION 1..343: note = variant of RNA ligase 2 from Escherichia phage RB69 (Bacteriophage RB69)
MHHHHHHGGSGMFKKYSSLENHYNSKFIEKLYTNGLTTGVWVAREKIHGTNFSLIIERDNVTCAKRTGPILPAEDFYGYEIVLKKYDKAIKTVQKFMYTARAVSYQVFGEFAGGGIQKGVDYGEKDFYVFDILINTESGDNTYLTDYEMQDFCNEFGFKMAPMLGRGTFDSLIMIPNDLDSVLAAYNATASEDLVEANNCVFDARVIGDNTAEGYVLKPCFPKWLPNGTRVAIKCKNSKFSEKKKSDKPIKTQVPLTEIDKNLLDVLACYVTLNRVNNVISKIGTVTPKDFGKVMGLTVQDILEETSREGIVLTTSDNPNLVKKELVRMVQDVLRPAWIELVS

SEQ ID NO: 71 - DNA, 1029 bp, synthetic construct
  misc_feature 1..1029: note = variant of RNA ligase 2 from Escherichia phage RB69 (Bacteriophage RB69)
  source 1..1029: mol_type = other DNA
atgcatcaccatcaccatcacggtggcagcggtatgtttaagaaatattctagtctggaaaaccattacaatagcaaattcattgagaaactctataccaacggcttaactactggtgtgtgggttgcgcgcgaaaagatccacgggacgaacttttcgctgattatcgagcgtgataatgtaacatgcgccaaacgtacaggcccgattttgcctgcagaagacttctacggttatgaaatcgtcctgaagaaatacgataaagcgattaagacggtgcagaaatttatgtataccgcccgcgcggtttcctaccaagtgttcggagaatttgctggcggcggtatccagaaaggtgtcgattatggcgagaaagacttctatgtgtttgatattctgatcaatacggaatcaggagacaacacgtacctgactgattatgaaatgcaggacttctgtaatgaatttgggtttaagatggcaccaatgcttggtcgcggcacattcgatagcctgattatgattccgaacgatttggattcggttctcgccgcttacaatgcaacggcgagcgaggacctggtagaagcgaacaactgcgtctttgatgccaatgtgatcggtcttaacactgctgaaggctatgttcttaaaccgtgtttccccaaatggttaccgaatgggacgcgtgtggcgatcaaatgcaagaactccaaattcagcgagaagaagaaaagtgacaaaccgatcaagacacaagtcccactgacggaaattgataagaatctgctggacgtattggcctgttacgtcactttaaaccgcgtgaacaacgtgatctctaagattggaacagtgacgccgaaagattttggcaaagtaatgggtctgactgttcaggatattctggaagaaacgtcacgtgagggtattgttctgacgacatcggacaatcctaatctcgtcaagaaagaacttgttcgcatggtgcaggatgtattacgtcccgcatggatcgaactggtgtcg

SEQ ID NO: 72 - protein, 343 aa, synthetic construct
  REGION 1..343: note = variant of RNA ligase 2 from Escherichia phage RB69 (Bacteriophage RB69)
MHHHHHHGGSGMFKKYSSLENHYNSKFIEKLYTNGLTTGVWVAREKIHGTNFSLIIERDNVTCAKRTGPILPAEDFYGYEIVLKKYDKAIKTVQKFMYTARAVSYQVFGEFAGGGIQKGVDYGEKDFYVFDILINTESGDNTYLTDYEMQDFCNEFGFKMAPMLGRGTFDSLIMIPNDLDSVLAAYNATASEDLVEANNCVFDANVIGLNTAEGYVLKPCFPKWLPNGTRVAIKCKNSKFSEKKKSDKPIKTQVPLTEIDKNLLDVLACYVTLNRVNNVISKIGTVTPKDFGKVMGLTVQDILEETSREGIVLTTSDNPNLVKKELVRMVQDVLRPAWIELVS

SEQ ID NO: 73 - DNA, 1029 bp, synthetic construct
  misc_feature 1..1029: note = variant of RNA ligase 2 from Escherichia phage RB69 (Bacteriophage RB69)
  source 1..1029: mol_type = other DNA
atgcatcaccatcaccatcacggtggcagcggtatgtttaagaaatattctagtctggaaaaccattacaatagcaaattcattgagaaactctataccaacggcttaactactggtgtgtgggttgcgcgcgaaaagatccacgggacgaacttttcgctgattatcgagcgtgataatgtaacatgcgccaaacgtacaggcccgattttgcctgcagaagacttctacggttatgaaatcgtcctgaagaaatacgataaagcgattaagacggtgcagaaatttatgtataccgcccgcgcggtttcctaccaagtgttcggagaatttgctggcggcggtatccagaaaggtgtcgattatggcgagaaagacttctatgtgtttgatattctgatcaatacggaatcaggagacaacacgtacctggatgattatgaaatgcaggacttctgtaatgaatttgggtttaagatggcaccaatgcttggtcgcggcacattcgatagcctgattatgattccgaacgatttggattcggttctcgccgcttacaatgcaacggcgagcgaggacctggtagaagcgaacaactgcgtctttgatgccaatgtgatcggtgataacactgctgaaggctatgttcttaaaccgtgtttccccaaatggttaccgaatgggacgcgtgtggcgatcaaatgcaagaactccaaattcagcgagaagaagaaaagtgacaaaccgatcaagacacaagtcccactgacggaaattgataagaatctgctggacgtattggcctgttacgtcactttaaaccgcgtgaacaacgtgatctctaagattggaacagtgacgccgaaagattttggcaaagtaatgggtctgactgttcaggatattctggaagaaacgtcacgtgagggtattgttctgacgacatcggacaatcctaatctcgtcaagaaagaacttgttcgcatggtgcaggatgtattacgtcccgcatggatcgaactggtgtcg

SEQ ID NO: 74 - protein, 343 aa, synthetic construct
  REGION 1..343: note = variant of RNA ligase 2 from Escherichia phage RB69 (Bacteriophage RB69)
MHHHHHHGGSGMFKKYSSLENHYNSKFIEKLYTNGLTTGVWVAREKIHGTNFSLIIERDNVTCAKRTGPILPAEDFYGYEIVLKKYDKAIKTVQKFMYTARAVSYQVFGEFAGGGIQKGVDYGEKDFYVFDILINTESGDNTYLDDYEMQDFCNEFGFKMAPMLGRGTFDSLIMIPNDLDSVLAAYNATASEDLVEANNCVFDANVIGDNTAEGYVLKPCFPKWLPNGTRVAIKCKNSKFSEKKKSDKPIKTQVPLTEIDKNLLDVLACYVTLNRVNNVISKIGTVTPKDFGKVMGLTVQDILEETSREGIVLTTSDNPNLVKKELVRMVQDVLRPAWIELVS

SEQ ID NO: 75 - DNA, 1029 bp, synthetic construct
  misc_feature 1..1029: note = variant of RNA ligase 2 from Escherichia phage RB69 (Bacteriophage RB69)
  source 1..1029: mol_type = other DNA
atgcatcaccatcaccatcacggtggcagcggtatgtttcggaaatattctagtctggaaaaccattacaatagcaaattcattgagaaactctataccaacggcttaactactggtgtgtgggttgcgcgcgaaaagatccacgggacgaacttttcgctgattatcgagcgtgataatgtaacatgcgccaaacgtacaggcccgattttgcctgcagaagacttctacggttatgaaatcgtcctgaagaaatacgataaagcgattaagacggtgcagaaatttatgtataccgcccgcgcggtttcctaccaagtgttcggagaatttgctggcggcggtatccagaaaggtgtcgattatggcgagaaagacttctatgtgtttgatattctgatcaatacggaatcaggagacaacacgtacctgactgattatgaaatgcaggacttctgtaatgaatttgggtttaagatggcaccaatgcttggtcgcggcacattcgatagcctgattatgattccgaacgatttggattcggttctcgccgcttacaatgcaacggcgagcgaggacctggtagaagcgaacaactgcgtctttgatgccaatgtgatcggtgataacactgctgaaggctatgttcttaaaccgtgtttccccaaatggttaccgaatgggacgcgtgtggcgatcaaatgcaagaactccaaattcagcgagaagaagaaaagtgacaaaccgatcaagacacaagtcccactgacggaaattgataagaatctgctggacgtattggcctgttacgtcactttaaaccgcgtgaacaacgtgatctctaagattggaacagtgacgccgaaagattttggcaaagtaatgggtctgactgttcaggatattctggaagaaacgtcacgtgagggtattgttctgacgacatcggacaatcctaatctcgtcaagaaagaacttgttcgcatggtgcaggatgtattacgtcccgcatggatcgaactggtgtcg

SEQ ID NO: 76 - protein, 343 aa, synthetic construct
  REGION 1..343: note = variant of RNA ligase 2 from Escherichia phage RB69 (Bacteriophage RB69)
MHHHHHHGGSGMFRKYSSLENHYNSKFIEKLYTNGLTTGVWVAREKIHGTNFSLIIERDNVTCAKRTGPILPAEDFYGYEIVLKKYDKAIKTVQKFMYTARAVSYQVFGEFAGGGIQKGVDYGEKDFYVFDILINTESGDNTYLTDYEMQDFCNEFGFKMAPMLGRGTFDSLIMIPNDLDSVLAAYNATASEDLVEANNCVFDANVIGDNTAEGYVLKPCFPKWLPNGTRVAIKCKNSKFSEKKKSDKPIKTQVPLTEIDKNLLDVLACYVTLNRVNNVISKIGTVTPKDFGKVMGLTVQDILEETSREGIVLTTSDNPNLVKKELVRMVQDVLRPAWIELVS

SEQ ID NO: 77 - DNA, 1029 bp, synthetic construct
  misc_feature 1..1029: note = variant of RNA ligase 2 from Escherichia phage RB69 (Bacteriophage RB69)
  source 1..1029: mol_type = other DNA
atgcatcaccatcaccatcacggtggcagcggtatgtttaagaaatattctagtctggaaaaccattacaatagcaaattcattgagaaactctataccaacggcttaactactggtgtgtgggttgcgcgcgaaaagatccacgggacgaacttttcgctgattatcgagcgtgataatgtaacatgcgccaaacgtacaggcccgattttgcctgcagaagacttctacggttatgaaatcgtcctgaagaaatacgataaagcgattaagacggtgcagaaatttatgtataccgcccgcgcggtttcctaccaagtgttcggagaatttgctggcggcggtatccagaaaggtgtcgattatggcgagaaagacttctatgtgtttgatattctgatcaatacggaatcaggagacaacacgtacctgactgattatgaaatgcaggacttctgtaatgaatttgggtttaagatggcaccaatgcttggtcgcggcacattcgatagcctgattatgattccgaacgatttggattcggttctcgccgcttacaatgcaacggcgagcgaggacctggtagaagcgaacaactgcgtctttgatgccaatgtgatcggtgagaacactgctgaaggctatgttcttaaaccgtgtttccccaaatggttaccgaatgggacgcgtgtggcgatcaaatgcaagaactccaaattcagcgagaagaagaaaagtgacaaaccgatcaagacacaagtcccactgacggaaattgataagaatctgctggacgtattggcctgttacgtcactttaaaccgcgtgaacaacgtgatctctaagattggaacagtgacgccgaaagattttggcaaagtaatgggtctgactgttcaggatattctggaagaaacgtcacgtgagggtattgttctgacgacatcggacaatcctaatctcgtcaagaaagaacttgttcgcatggtgcaggatgtattacgtcccgcatggatcgaactggtgtcg

SEQ ID NO: 78 - protein, 343 aa, synthetic construct
  REGION 1..343: note = variant of RNA ligase 2 from Escherichia phage RB69 (Bacteriophage RB69)
MHHHHHHGGSGMFKKYSSLENHYNSKFIEKLYTNGLTTGVWVAREKIHGTNFSLIIERDNVTCAKRTGPILPAEDFYGYEIVLKKYDKAIKTVQKFMYTARAVSYQVFGEFAGGGIQKGVDYGEKDFYVFDILINTESGDNTYLTDYEMQDFCNEFGFKMAPMLGRGTFDSLIMIPNDLDSVLAAYNATASEDLVEANNCVFDANVIGENTAEGYVLKPCFPKWLPNGTRVAIKCKNSKFSEKKKSDKPIKTQVPLTEIDKNLLDVLACYVTLNRVNNVISKIGTVTPKDFGKVMGLTVQDILEETSREGIVLTTSDNPNLVKKELVRMVQDVLRPAWIELVS

SEQ ID NO: 79 - DNA, 1029 bp, synthetic construct
  misc_feature 1..1029: note = variant of RNA ligase 2 from Escherichia phage RB69 (Bacteriophage RB69)
  source 1..1029: mol_type = other DNA
atgcatcaccatcaccatcacggtggcagcggtatgtttaagaaatattctagtctggaaaaccattacaatagcaaattcattgagaaactctataccaacggcttaactactggtgtgtgggttgcgcgcgaaaagatccacgggacgaacttttcgctgattatcgagcgtgataatgtaacatgcgccaaacgtacaggcccgattttgcctgcagaagacttctacggttatgaaatcgtcctgaagaaatacgataaagcgattaagacggtgcagaaatttatgtataccgcccgcgcggtttcctaccaagtgttcggagaatttgctggcggcggtatccagaaaggtgtcgattatggcgagaaagacttctatgtgtttgatattctgatcaatacggaatcaggagacaacacgtacctgactgattatgaaatgcaggacttctgtaatgaatttgggtttaagatggcaccaatgcttggtcgcggcacattcgatagcctgattatgattccgaacgatttggattcggttctcgccgcttacaatgcaacggcgagcgaggacctggtagaagcgaacaactgcgtctttgatgccaatgtgatcggtgataacactgctgaaggctatgttcttaaaccgtgtttccccaaatggttaccgaatgggacgcgtgtggcgatcaaatgcaagaactccaaattcagcgagaagaagaaaagtgacaaaccgatcaagacacaagtcccactgacggaaattgataagaatctgctggacgtattggcctgttacgtcactttaaaccgcgtgaacaacgtgatctctaagattggaacagtgacgccgaaagattttggcaaagtaatgggtctgactgttcaggatattctggaagaaacgtcacgtgagggtattgttctgacgacatcggacaatcctaatctcgtcaagaaagaacttgttcgcatggtgcaggatgtattacgtcccgcatggatcgaactgatctcg

SEQ ID NO: 80 - protein, 343 aa, synthetic construct
  REGION 1..343: note = variant of RNA ligase 2 from Escherichia phage RB69 (Bacteriophage RB69)
MHHHHHHGGSGMFKKYSSLENHYNSKFIEKLYTNGLTTGVWVAREKIHGTNFSLIIERDNVTCAKRTGPILPAEDFYGYEIVLKKYDKAIKTVQKFMYTARAVSYQVFGEFAGGGIQKGVDYGEKDFYVFDILINTESGDNTYLTDYEMQDFCNEFGFKMAPMLGRGTFDSLIMIPNDLDSVLAAYNATASEDLVEANNCVFDANVIGDNTAEGYVLKPCFPKWLPNGTRVAIKCKNSKFSEKKKSDKPIKTQVPLTEIDKNLLDVLACYVTLNRVNNVISKIGTVTPKDFGKVMGLTVQDILEETSREGIVLTTSDNPNLVKKELVRMVQDVLRPAWIELIS

SEQ ID NO: 81 - DNA, 1029 bp, synthetic construct
  misc_feature 1..1029: note = variant of RNA ligase 2 from Escherichia phage RB69 (Bacteriophage RB69)
  source 1..1029: mol_type = other DNA
atgcatcaccatcaccatcacggtggcagcggtatgtttaagaaatattctagtctggaaaaccattacaatagcaaattcattgagaaactctataccaacggcttaactactggtgtgtgggttgcgcgcgaaaagatccacgggacgaacttttcgctgattatcgagcgtgataatgtaacatgcgccaaacgtacaggcccgattttgcctgcagaagacttctacggttatgaaatcgtcctgaagaaatacgataaagcgattaagacggtgcagaaatttatgtataccgcccgcgcggtttcctaccaagtgttcggagaatttgctggcggcggtatccagaaaggtgtcgattatggcgagaaagacttctatgtgtttgatattctgatcaatacggaatcaggagacaacacgtacctgactgattatgaaatgcaggacttctgtaatgaatttgggtttaagatggcaccaatgcttggtcgcggcacattcgatagcctgattatgattccgaacgatttggattcggttctcgccgcttacaatgcaacggcgagcgaggacctggtagaagcgaacaactgcgtctttgatgccaatgtgatcggtgataacactgctgaaggctatgttcttaaaccgtgtttccccaaatggttaccgaatgggacgcgtgtggcgatcaaatgcaagaactccaaattcagcgagaagaagaaaagtgacaaaccgatcaagacacaagtcgaactgacggaaattgataagaatctgctggacgtattggcctgttacgtcactttaaaccgcgtgaacaacgtgatctctaagattggaacagtgacgccgaaagattttggcaaagtaatgggtctgactgttcaggatattctggaagaaacgtcacgtgagggtattgttctgacgacatcggacaatcctaatctcgtcaagaaagaacttgttcgcatggtgcaggatgtattacgtcccgcatggatcgaactggtgtcg

SEQ ID NO: 82 - protein, 343 aa, synthetic construct
  REGION 1..343: note = variant of RNA ligase 2 from Escherichia phage RB69 (Bacteriophage RB69)
MHHHHHHGGSGMFKKYSSLENHYNSKFIEKLYTNGLTTGVWVAREKIHGTNFSLIIERDNVTCAKRTGPILPAEDFYGYEIVLKKYDKAIKTVQKFMYTARAVSYQVFGEFAGGGIQKGVDYGEKDFYVFDILINTESGDNTYLTDYEMQDFCNEFGFKMAPMLGRGTFDSLIMIPNDLDSVLAAYNATASEDLVEANNCVFDANVIGDNTAEGYVLKPCFPKWLPNGTRVAIKCKNSKFSEKKKSDKPIKTQVELTEIDKNLLDVLACYVTLNRVNNVISKIGTVTPKDFGKVMGLTVQDILEETSREGIVLTTSDNPNLVKKELVRMVQDVLRPAWIELVS

SEQ ID NO: 83 - DNA, 1029 bp, synthetic construct
  misc_feature 1..1029: note = variant of RNA ligase 2 from Escherichia phage RB69 (Bacteriophage RB69)
  source 1..1029: mol_type = other DNA
atgcatcaccatcaccatcacggtggcagcggtatgtttaagaaatattctagtctggaaaaccattacaatagcaaattcattgagaaactctataccaacggcttaactactggtgtgtgggttgcgcgcgaaaagatccacgggacgaacttttcgctgattatcgagcgtgataatgtaacatgcgccaaacgtacaggcccgattttgcctgcagaagacttctacggttatgaaatcgtcctgaagaaatacgataaagcgattaagacggtgcagaaatttatgtataccgcccgcgcggtttcctaccaagtgttcggagaatttgctggcggcggtatccagaaaggtgtcgattatggcgagaaagacttctatgtgtttgatattctgatcaatacggaatcaggagacaacacgtacctgactgattatgaaatgcaggacttctgtaatgaatttgggtttaagatggcaccaatgcttggtcgcggcacattcgatagcctgattatgattccgaacgatttggattcggttctcgccgcttacaatgcaacggcgagcgaggacctggtagaagcgaacaactgcgtctttgatgccaatgtgatcggtgataacactgctgaaggctatgttcttaaaccgtgtttccccaaatggttaccgaatgggacgcgtgtggcgatcaaatgcaagaactccaaattcagcgagaagaagaaaagtgacaaaccgatcaagacacaagtcccactgacggaaattgataagaatctgctggacgtattggcctgttacgtcactttaaaccgcgtgaacaacgtgatctctaagattggaacagtgacgccgaaagattttggcaaagtaatgggtctgactgttcaggatattctggaagaaacgtcacgtgagggtattgttctgacgacatcggacaatcctaatctcgtcaagaaagaacttcagcgcatggtgcaggatgtattacgtcccgcatggatcgaactggtgtcg

SEQ ID NO: 84 - protein, 343 aa, synthetic construct
  REGION 1..343: note = variant of RNA ligase 2 from Escherichia phage RB69 (Bacteriophage RB69)
MHHHHHHGGSGMFKKYSSLENHYNSKFIEKLYTNGLTTGVWVAREKIHGTNFSLIIERDNVTCAKRTGPILPAEDFYGYEIVLKKYDKAIKTVQKFMYTARAVSYQVFGEFAGGGIQKGVDYGEKDFYVFDILINTESGDNTYLTDYEMQDFCNEFGFKMAPMLGRGTFDSLIMIPNDLDSVLAAYNATASEDLVEANNCVFDANVIGDNTAEGYVLKPCFPKWLPNGTRVAIKCKNSKFSEKKKSDKPIKTQVPLTEIDKNLLDVLACYVTLNRVNNVISKIGTVTPKDFGKVMGLTVQDILEETSREGIVLTTSDNPNLVKKELQRMVQDVLRPAWIELVS

SEQ ID NO: 85 - DNA, 1029 bp, synthetic construct
  misc_feature 1..1029: note = variant of RNA ligase 2 from Escherichia phage RB69 (Bacteriophage RB69)
  source 1..1029: mol_type = other DNA
atgcatcaccatcaccatcacggtggcagcggtatgtttaagaaatattctagtctggaaaaccattacaatagcaaattcattgagaaactctataccaacggcttaactactggtgtgtgggttgcgcgcgaaaagatccacgggacgaacttttcgctgattatcgagcgtgataatgtaacatgcgccaaacgtacaggcccgattttgcctgcagaagacttctacggttatgaaatcgtcctgaagaaatacgataaagcgattaagacggtgcagaaatttatgtataccgcccgcgcggtttcctaccaagtgttcggagaatttgctggcggcggtatccagaaaggtgtcgattatggcgagaaagacttctatgtgtttgatattctgatcaatacggaatcaggagacaacacgtacctgactgattatgaaatgcaggacttctgtaatgaatttgggtttaagatggcaccaatgcttggtcgcggcacattcgaaagcctgattatgattccgaacgatttggattcggttctcgccgcttacaatgcaacggcgagcgaggacctggtagaagcgaacaactgcgtctttgatgccaatgtgatcggtgataacactgctgaaggctatgttcttaaaccgtgtttccccaaatggttaccgaatgggacgcgtgtggcgatcaaatgcaagaactccaaattcagcgagaagaagaaaagtgacaaaccgatcaagacacaagtcccactgacggaaattgataagaatctgctggacgtattggcctgttacgtcactttaaaccgcgtgaacaacgtgatctctaagattggaacagtgacgccgaaagattttggcaaagtaatgggtctgactgttcaggatattctggaagaaacgtcacgtgagggtattgttctgacgacatcggacaatcctaatctcgtcaagaaagaacttgttcgcatggtgcaggatgtattacgtcccgcatggatcgaactggtgtcg

SEQ ID NO: 86 - protein, 343 aa, synthetic construct
  REGION 1..343: note = variant of RNA ligase 2 from Escherichia phage RB69 (Bacteriophage RB69)
MHHHHHHGGSGMFKKYSSLENHYNSKFIEKLYTNGLTTGVWVAREKIHGTNFSLIIERDNVTCAKRTGPILPAEDFYGYEIVLKKYDKAIKTVQKFMYTARAVSYQVFGEFAGGGIQKGVDYGEKDFYVFDILINTESGDNTYLTDYEMQDFCNEFGFKMAPMLGRGTFESLIMIPNDLDSVLAAYNATASEDLVEANNCVFDANVIGDNTAEGYVLKPCFPKWLPNGTRVAIKCKNSKFSEKKKSDKPIKTQVPLTEIDKNLLDVLACYVTLNRVNNVISKIGTVTPKDFGKVMGLTVQDILEETSREGIVLTTSDNPNLVKKELVRMVQDVLRPAWIELVS

SEQ ID NO: 87 - DNA, 1029 bp, synthetic construct
  misc_feature 1..1029: note = variant of RNA ligase 2 from Escherichia phage RB69 (Bacteriophage RB69)
  source 1..1029: mol_type = other DNA
atgcatcaccatcaccatcacggtggcagcggtatgtttaagaaatattctagtctggaaaaccattacaatagcaaattcattgagaaactctataccaacggcttaactactggtgtgtgggttgcgcgcgaaaagatccacgggacgaacttttcgctgattatcgagcgtgataatgtaacatgcgccaaacgtacaggcccgattttgcctgcagaagacttctacggttatgaaatcgtcctgaagaaatacgataaagcgattaagacggtgcagaaatttatgtataccgcccgcgcggtttcctaccaagtgttcggagaatttgctggcggcggtatccagaaaggtgtcgattatggcgagaaagacttctatgtgtttgatattctgatcaatacggaatcaggagacgagacgtacctgactgattatgaaatgcaggacttctgtaatgaatttgggtttaagatggcaccaatgcttggtcgcggcacattcgatagcctgattatgattccgaacgatttggattcggttctcgccgcttacaatgcaacggcgagcgaggacctggtagaagcgaacaactgcgtctttgatgccaatgtgatcggtgataacactgctgaaggctatgttcttaaaccgtgtttccccaaatggttaccgaatgggacgcgtgtggcgatcaaatgcaagaactccaaattcagcgagaagaagaaaagtgacaaaccgatcaagacacaagtcccactgacggaaattgataagaatctgctggacgtattggcctgttacgtcactttaaaccgcgtgaacaacgtgatctctaagattggaacagtgacgccgaaagattttggcaaagtaatgggtctgactgttcaggatattctggaagaaacgtcacgtgagggtattgttctgacgacatcggacaatcctaatctcgtcaagaaagaacttgttcgcatggtgcaggatgtattacgtcccgcatggatcgaactggtgtcg

SEQ ID NO: 88 - protein, 343 aa, synthetic construct
  REGION 1..343: note = variant of RNA ligase 2 from Escherichia phage RB69 (Bacteriophage RB69)
MHHHHHHGGSGMFKKYSSLENHYNSKFIEKLYTNGLTTGVWVAREKIHGTNFSLIIERDNVTCAKRTGPILPAEDFYGYEIVLKKYDKAIKTVQKFMYTARAVSYQVFGEFAGGGIQKGVDYGEKDFYVFDILINTESGDETYLTDYEMQDFCNEFGFKMAPMLGRGTFDSLIMIPNDLDSVLAAYNATASEDLVEANNCVFDANVIGDNTAEGYVLKPCFPKWLPNGTRVAIKCKNSKFSEKKKSDKPIKTQVPLTEIDKNLLDVLACYVTLNRVNNVISKIGTVTPKDFGKVMGLTVQDILEETSREGIVLTTSDNPNLVKKELVRMVQDVLRPAWIELVS

SEQ ID NO: 89 - DNA, 1029 bp, synthetic construct
  misc_feature 1..1029: note = variant of RNA ligase 2 from Escherichia phage RB69 (Bacteriophage RB69)
  source 1..1029: mol_type = other DNA
atgcatcaccatcaccatcacggtggcagcggtatgtttaagaaatattctagtctggaaaaccattacaatagcaaattcattgagaaactctataccaacggcttaactactggtgtgtgggttgcgcgcgaaaagatccacgggacgaacttttcgctgattatcgagcgtgataatgtaacatgcgccaaacgtacaggcccgattttgcctgcagaagacttctacggttatgaaatcgtcctgaagaaatacgataaagcgattaagacggtgcagaaatttatgccgaccgcccgcgcggtttcctaccaagtgttcggagaatttgctggcggcggtatccagaaaggtgtcgattatggcgagaaagacttctatgtgtttgatattctgatcaatacggaatcaggagacaacacgtacctgactgattatgaaatgcaggacttctgtaatgaatttgggtttaagatggcaccaatgcttggtcgcggcacattcgatagcctgattatgattccgaacgatttggattcggttctcgccgcttacaatgcaacggcgagcgaggacctggtagaagcgaacaactgcgtctttgatgccaatgtgatcggtgataacactgctgaaggctatgttcttaaaccgtgtttccccaaatggttaccgaatgggacgcgtgtggcgatcaaatgcaagaactccaaattcagcgagaagaagaaaagtgacaaaccgatcaagacacaagtcccactgacggaaattgataagaatctgctggacgtattggcctgttacgtcactttaaaccgcgtgaacaacgtgatctctaagattggaacagtgacgccgaaagattttggcaaagtaatgggtctgactgttcaggatattctggaagaaacgtcacgtgagggtattgttctgacgacatcggacaatcctaatctcgtcaagaaagaacttgttcgcatggtgcaggatgtattacgtcccgcatggatcgaactggtgtcg

SEQ ID NO: 90 - protein, 343 aa, synthetic construct
  REGION 1..343: note = variant of RNA ligase 2 from Escherichia phage RB69 (Bacteriophage RB69)
MHHHHHHGGSGMFKKYSSLENHYNSKFIEKLYTNGLTTGVWVAREKIHGTNFSLIIERDNVTCAKRTGPILPAEDFYGYEIVLKKYDKAIKTVQKFMPTARAVSYQVFGEFAGGGIQKGVDYGEKDFYVFDILINTESGDNTYLTDYEMQDFCNEFGFKMAPMLGRGTFDSLIMIPNDLDSVLAAYNATASEDLVEANNCVFDANVIGDNTAEGYVLKPCFPKWLPNGTRVAIKCKNSKFSEKKKSDKPIKTQVPLTEIDKNLLDVLACYVTLNRVNNVISKIGTVTPKDFGKVMGLTVQDILEETSREGIVLTTSDNPNLVKKELVRMVQDVLRPAWIELVS

SEQ ID NO: 91 - DNA, 1029 bp, synthetic construct
  misc_feature 1..1029: note = variant of RNA ligase 2 from Escherichia phage RB69 (Bacteriophage RB69)
  source 1..1029: mol_type = other DNA
atgcatcaccatcaccatcacggtggcagcggtatgtttaagaaatattctagtctggaaaaccattacaatagcaaattcattgagaaactctataccaacggcttaactactggtgtgtgggttgcgcgcgaaaagatccacgggacgaacttttcgctgattatcgagcgtgataatgtaacatgcgccaaacgtacaggcccgattttgcctgcagaagacttctacggttatgaaatcgtcctgaagaaatacgataaagcgattaagacggtgcagaaatttatgtataccgcccgcgcggtttcctaccaagtgttcggagaatttgctggcggcggtatccagaaaggtgtcgattatggcgagaaagacttctatgtgtttgatattctgatcaatacggaatcaggagacaacacgtacctgactgattatgaaatgcaggacttctgtaatgaatttgggtttaagatggcaccaatgcttggtcgcggcacattcgatagcctgattatgattccgaacgatttggattcggttctcgccgcttacaatgcaacggcgagcgaggacctggtagaagcgaacaactgcgtctttgatgccaatgtgatcggtgataacactgctgaaggctatgttcttaaaccgtgtttccccaaatggttaccgaatgggacgcgtgtggcgatcaaatgcaagaactccaaattcagcgagaagaagaaaagtgacaaaccgatcaagacacaagtcccactgacggaaattgataagaatctgctggacgtattggcctgttacgtcactttaaaccgcgtgaacaacgtgatctctaagattggaacagtgacgccgaaagattttggcaaagtaatgggtctgactgttcaggatattctggaagaaacgtcacgtgagggtattgttctgacgacatcggacaatcctaatctcgtcaagaaagaacttgttcgcatggtgcaggatgtattacgtcccgcatggaaggaactggtgtcg

SEQ ID NO: 92 - protein, 343 aa, synthetic construct
  REGION 1..343: note = variant of RNA ligase 2 from Escherichia phage RB69 (Bacteriophage RB69)
MHHHHHHGGSGMFKKYSSLENHYNSKFIEKLYTNGLTTGVWVAREKIHGTNFSLIIERDNVTCAKRTGPILPAEDFYGYEIVLKKYDKAIKTVQKFMYTARAVSYQVFGEFAGGGIQKGVDYGEKDFYVFDILINTESGDNTYLTDYEMQDFCNEFGFKMAPMLGRGTFDSLIMIPNDLDSVLAAYNATASEDLVEANNCVFDANVIGDNTAEGYVLKPCFPKWLPNGTRVAIKCKNSKFSEKKKSDKPIKTQVPLTEIDKNLLDVLACYVTLNRVNNVISKIGTVTPKDFGKVMGLTVQDILEETSREGIVLTTSDNPNLVKKELVRMVQDVLRPAWKELVS

SEQ ID NO: 93 - DNA, 1029 bp, synthetic construct
  misc_feature 1..1029: note = variant of RNA ligase 2 from Escherichia phage RB69 (Bacteriophage RB69)
  source 1..1029: mol_type = other DNA
atgcatcaccatcaccatcacggtggcagcggtatgtttaagaaatattctagtctggaaaaccattacaatagcaaattcattgagaaactctataccaacggcttaactgatggtgtgtgggttgcgcgcgaaaagatccacgggacgaacttttcgctgattatcgagcgtgataatgtaacatgcgccaaacgtacaggcccgattttgcctgcagaagacttctacggttatgaaatcgtcctgaagaaatacgataaagcgattaagacggtgcagaaatttatgtataccgcccgcgcggtttcctaccaagtgttcggagaatttgctggcggcggtatccagaaaggtgtcgattatggcgagaaagacttctatgtgtttgatattctgatcaatacggaatcaggagacaacacgtacctgactgattatgaaatgcaggacttctgtaatgaatttgggtttaagatggcaccaatgcttggtcgcggcacattcgatagcctgattatgattccgaacgatttggattcggttctcgccgcttacaatgcaacggcgagcgaggacctggtagaagcgaacaactgcgtctttgatgccaatgtgatcggtgataacactgctgaaggctatgttcttaaaccgtgtttccccaaatggttaccgaatgggacgcgtgtggcgatcaaatgcaagaactccaaattcagcgagaagaagaaaagtgacaaaccgatcaagacacaagtcccactgacggaaattgataagaatctgctggacgtattggcctgttacgtcactttaaaccgcgtgaacaacgtgatctctaagattggaacagtgacgccgaaagattttggcaaagtaatgggtctgactgttcaggatattctggaagaaacgtcacgtgagggtattgttctgacgacatcggacaatcctaatctcgtcaagaaagaacttgttcgcatggtgcaggatgtattacgtcccgcatggatcgaactggtgtcg

SEQ ID NO: 94 - protein, 343 aa, synthetic construct
  REGION 1..343: note = variant of RNA ligase 2 from Escherichia phage RB69 (Bacteriophage RB69)
MHHHHHHGGSGMFKKYSSLENHYNSKFIEKLYTNGLTDGVWVAREKIHGTNFSLIIERDNVTCAKRTGPILPAEDFYGYEIVLKKYDKAIKTVQKFMYTARAVSYQVFGEFAGGGIQKGVDYGEKDFYVFDILINTESGDNTYLTDYEMQDFCNEFGFKMAPMLGRGTFDSLIMIPNDLDSVLAAYNATASEDLVEANNCVFDANVIGDNTAEGYVLKPCFPKWLPNGTRVAIKCKNSKFSEKKKSDKPIKTQVPLTEIDKNLLDVLACYVTLNRVNNVISKIGTVTPKDFGKVMGLTVQDILEETSREGIVLTTSDNPNLVKKELVRMVQDVLRPAWIELVS

SEQ ID NO: 95 - DNA, 1029 bp, synthetic construct
  misc_feature 1..1029: note = variant of RNA ligase 2 from Escherichia phage RB69 (Bacteriophage RB69)
  source 1..1029: mol_type = other DNA
atgcatcaccatcaccatcacggtggcagcggtatgtttaagaaatattctagtctggaaaaccattacaatagcaaattcattgagaaactctataccaacggcttaactactggtgtgtgggttgcgcgcgaaaagatccacgggacgaacttttcgctgattatcgagcgtgataatgtaacatgcgccaaacgtacaggcccgattttgcctgcagaagacttctacggttatgaaatcgtcctgaagaaatacgataaagcgattaagacggtgcagaaatttatgtataccgcccgcgcggtttcctaccaagtgttcggagaatttgctggcggcggtatccagaaaggtgtcgattatggcgagaaagacttctatgtgtttgatattctgatcaatacggaatcaggagacaaccattacctgactgattatgaaatgcaggacttctgtaatgaatttgggtttaagatggcaccaatgcttggtcgcggcacattcgatagcctgattatgattccgaacgatttggattcggttctcgccgcttacaatgcaacggcgagcgaggacctggtagaagcgaacaactgcgtctttgatgccaatgtgatcggtgataacactgctgaaggctatgttcttaaaccgtgtttccccaaatggttaccgaatgggacgcgtgtggcgatcaaatgcaagaactccaaattcagcgagaagaagaaaagtgacaaaccgatcaagacacaagtcccactgacggaaattgataagaatctgctggacgtattggcctgttacgtcactttaaaccgcgtgaacaacgtgatctctaagattggaacagtgacgccgaaagattttggcaaagtaatgggtctgactgttcaggatattctggaagaaacgtcacgtgagggtattgttctgacgacatcggacaatcctaatctcgtcaagaaagaacttgttcgcatggtgcaggatgtattacgtcccgcatggatcgaactggtgtcg

SEQ ID NO: 96 - protein, 343 aa, synthetic construct
  REGION 1..343: note = variant of RNA ligase 2 from Escherichia phage RB69 (Bacteriophage RB69)
MHHHHHHGGSGMFKKYSSLENHYNSKFIEKLYTNGLTTGVWVAREKIHGTNFSLIIERDNVTCAKRTGPILPAEDFYGYEIVLKKYDKAIKTVQKFMYTARAVSYQVFGEFAGGGIQKGVDYGEKDFYVFDILINTESGDNHYLTDYEMQDFCNEFGFKMAPMLGRGTFDSLIMIPNDLDSVLAAYNATASEDLVEANNCVFDANVIGDNTAEGYVLKPCFPKWLPNGTRVAIKCKNSKFSEKKKSDKPIKTQVPLTEIDKNLLDVLACYVTLNRVNNVISKIGTVTPKDFGKVMGLTVQDILEETSREGIVLTTSDNPNLVKKELVRMVQDVLRPAWIELVS

SEQ ID NO: 97 - DNA, 1029 bp, synthetic construct
  misc_feature 1..1029: note = variant of RNA ligase 2 from Escherichia phage RB69 (Bacteriophage RB69)
  source 1..1029: mol_type = other DNA
atgcatcaccatcaccatcacggtggcagcggtatgtttaagaaatattctagtctggaaaaccattacaatagcaaattcattgagaaactctataccaacggcttaactactggtgtgtgggttgcgcgcgaaaagatccacgggacgaacttttcgctgattatcgagcgtgataatgtaacatgcgccaaacgtacaggcccgattttgcctgcagaacaattctacggttatgaaatcgtcctgaagaaatacgataaagcgattaagacggtgcagaaatttatgtataccgcccgcgcggtttcctaccaagtgttcggagaatttgctggcggcggtatccagaaaggtgtcgattatggcgagaaagacttctatgtgtttgatattctgatcaatacggaatcaggagacaacacgtacctgactgattatgaaatgcaggacttctgtaatgaatttgggtttaagatggcaccaatgcttggtcgcggcacattcgatagcctgattatgattccgaacgatttggattcggttctcgccgcttacaatgcaacggcgagcgaggacctggtagaagcgaacaactgcgtctttgatgccaatgtgatcggtgataacactgctgaaggctatgttcttaaaccgtgtttccccaaatggttaccgaatgggacgcgtgtggcgatcaaatgcaagaactccaaattcagcgagaagaagaaaagtgacaaaccgatcaagacacaagtcccactgacggaaattgataagaatctgctggacgtattggcctgttacgtcactttaaaccgcgtgaacaacgtgatctctaagattggaacagtgacgccgaaagattttggcaaagtaatgggtctgactgttcaggatattctggaagaaacgtcacgtgagggtattgttctgacgacatcggacaatcctaatctcgtcaagaaagaacttgttcgcatggtgcaggatgtattacgtcccgcatggatcgaactggtgtcg

SEQ ID NO: 98 - protein, 343 aa, synthetic construct
  REGION 1..343: note = variant of RNA ligase 2 from Escherichia phage RB69 (Bacteriophage RB69)
MHHHHHHGGSGMFKKYSSLENHYNSKFIEKLYTNGLTTGVWVAREKIHGTNFSLIIERDNVTCAKRTGPILPAEQFYGYEIVLKKYDKAIKTVQKFMYTARAVSYQVFGEFAGGGIQKGVDYGEKDFYVFDILINTESGDNTYLTDYEMQDFCNEFGFKMAPMLGRGTFDSLIMIPNDLDSVLAAYNATASEDLVEANNCVFDANVIGDNTAEGYVLKPCFPKWLPNGTRVAIKCKNSKFSEKKKSDKPIKTQVPLTEIDKNLLDVLACYVTLNRVNNVISKIGTVTPKDFGKVMGLTVQDILEETSREGIVLTTSDNPNLVKKELVRMVQDVLRPAWIELVS

SEQ ID NO: 99 - DNA, 1029 bp, synthetic construct
  misc_feature 1..1029: note = variant of RNA ligase 2 from Escherichia phage RB69 (Bacteriophage RB69)
  source 1..1029: mol_type = other DNA
atgcatcaccatcaccatcacggtggcagcggtatgtttaagaaatattctagtctggaaaaccattacaatagcaaattcattgagaaactctataccaacggcttaactactggtgtgtgggttgcgcgcgaaaagatccacgggacgaacttttcgctgattatcgagcgtgataatgtaacatgcgccaaacgtacaggcccgattttgcctgcagaagacttctacggttatgaaatcgtcctgaagaaatacgataaagcgattaagacggtgcagaaatttatgtataccgcccgcgcggtttcctaccaagtgttcggagaatttgctggcggcggtatccagaaaggtgtcgattatggcgagaaagacttctatgtgtttgatattctgatcaatacggaatcaggagacaacacgtacctgactgattatgaaatgcaggacttctgtaatgaatttgggtttaagatggcaccaatgcttggtcgcggcacattcgatagcctgattatgattccgaacgatttggattcggttctcatggcttacaatgcaacggcgagcgaggacctggtagaagcgaacaactgcgtctttgatgccaatgtgatcggtgataacactgctgaaggctatgttcttaaaccgtgtttccccaaatggttaccgaatgggacgcgtgtggcgatcaaatgcaagaactccaaattcagcgagaagaagaaaagtgacaaaccgatcaagacacaagtcccactgacggaaattgataagaatctgctggacgtattggcctgttacgtcactttaaaccgcgtgaacaacgtgatctctaagattggaacagtgacgccgaaagattttggcaaagtaatgggtctgactgttcaggatattctggaagaaacgtcacgtgagggtattgttctgacgacatcggacaatcctaatctcgtcaagaaagaacttgttcgcatggtgcaggatgtattacgtcccgcatggatcgaactggtgtcg

SEQ ID NO: 100 - protein, 343 aa, synthetic construct
  REGION 1..343: note = variant of RNA ligase 2 from Escherichia phage RB69 (Bacteriophage RB69)
MHHHHHHGGSGMFKKYSSLENHYNSKFIEKLYTNGLTTGVWVAREKIHGTNFSLIIERDNVTCAKRTGPILPAEDFYGYEIVLKKYDKAIKTVQKFMYTARAVSYQVFGEFAGGGIQKGVDYGEKDFYVFDILINTESGDNTYLTDYEMQDFCNEFGFKMAPMLGRGTFDSLIMIPNDLDSVLMAYNATASEDLVEANNCVFDANVIGDNTAEGYVLKPCFPKWLPNGTRVAIKCKNSKFSEKKKSDKPIKTQVPLTEIDKNLLDVLACYVTLNRVNNVISKIGTVTPKDFGKVMGLTVQDILEETSREGIVLTTSDNPNLVKKELVRMVQDVLRPAWIELVS

SEQ ID NO: 101 - DNA, 1029 bp, synthetic construct
  misc_feature 1..1029: note = variant of RNA ligase 2 from Escherichia phage RB69 (Bacteriophage RB69)
  source 1..1029: mol_type = other DNA
atgcatcaccatcaccatcacggtggcagcggtatgtttaagaaatattctagtctggaaaaccattacaatagcaaattcattgagaaactctataccaacggcttaactactggtgtgtgggttgcgcgcgaaaagatccacgggacgaacttttcgctgattatcgagcgtgataatgtaacatgcgccaaacgtacaggcccgattttgcctgcagaagacttctacggttatgaaatcgtcctgaagaaatacgataaagcgattaagacggtgcagaaatttatgtataccgcccgcgcggtttcctaccaagtgttcggagaatttgctggcggcggtatccagaaaggtgtcgattatggcgagaaagacttctatgtgtttgatattctgatcaatacggaatcaggagacaacacgtacctgactgattatgaaatgcaggacttctgtaatgaatttgggtttaagatggcaccaatgcttggtcgcggcacattcgatagcctgattatgattccgaacgatttggattcggttctcgccgcttacaatgcaacggcgagcgaggacctggtagaagcgaacaactgcgtctttgatgccaatgtgatcggtgataacactgctgaaggctatgttcttaaaccgtgtttccccaaatggttaccgaatgggacgcgtgtggcgatcaaatgcaagaactccaaattcagcgagaagaagaaaagtgacaaaccgatcaagacacaagtcccactgacggaaattgataagaatctgctggacgtattggcctgttacgtcactttaaaccgcgtgaacaacgtgatctctaagattggaacagtgacgccgaaagattttggcaaagtaatgggtctgactgttcaggatattctggaagaaacgtcacgtgagggtattgttctgacgacatcggacaatcctaatctcgtcaagaaagaacttgttcgcatggtgcaggatgtattacgtcccgcatggatcgaactgacttcg

SEQ ID NO: 102 - protein, 343 aa, synthetic construct
  REGION 1..343: note = variant of RNA ligase 2 from Escherichia phage RB69 (Bacteriophage RB69)
MHHHHHHGGSGMFKKYSSLENHYNSKFIEKLYTNGLTTGVWVAREKIHGTNFSLIIERDNVTCAKRTGPILPAEDFYGYEIVLKKYDKAIKTVQKFMYTARAVSYQVFGEFAGGGIQKGVDYGEKDFYVFDILINTESGDNTYLTDYEMQDFCNEFGFKMAPMLGRGTFDSLIMIPNDLDSVLAAYNATASEDLVEANNCVFDANVIGDNTAEGYVLKPCFPKWLPNGTRVAIKCKNSKFSEKKKSDKPIKTQVPLTEIDKNLLDVLACYVTLNRVNNVISKIGTVTPKDFGKVMGLTVQDILEETSREGIVLTTSDNPNLVKKELVRMVQDVLRPAWIELTS

SEQ ID NO: 103 - DNA, 1029 bp, synthetic construct
  misc_feature 1..1029: note = variant of RNA ligase 2 from Escherichia phage RB69 (Bacteriophage RB69)
  source 1..1029: mol_type = other DNA
atgcatcaccatcaccatcacggtggcagcggtatgtttaagaaatattctagtctggaaaaccattacaatagcaaattcattgagaaactctataccaacggcttaactactggtgtgtgggttgcgcgcgaaaagatccacgggacgaacttttcgctgattatcgagcgtgataatgtaacatgcgccaaacgtacaggcccgattttgcctgcagaagacttctacggttatgaaatcgtcctgaagaaatacgataaagcgattaagacggtgcagaaatttatgtataccgcccgcgcggtttcctaccaagtgttcggagaatttgctggcggcggtatccagaaaggtgtcgattatggcgagaaagacttctatgtgtttgatattctgatcaatacggaatcaggagacaacacgtacctgactgattatgaaatgcaggacttctgtaatgaatttgggtttaagatggcaccaatgcttggtcgcggcacattcgatagcctgattatgattccgaacgatttggattcggttctcgccgcttacaatgcaacggcgagcgaggacctggtagaagcgaacaactgcgtctttgatgccaatgtgatcggtgataacactgctgaaggctatgttcttaaaccgtgtttccccaaatggttaccgaatgggacgcgtgtggcgatcaaatgcaagaactccaaattcagcgagaagaagaaaagtgacaaaccgatcaagacacaagtcccactgacggaaattgataagaatctgctggacgtattggcctgttacgtcactttaaaccgcgtgaacaacgtgatctctaagattggaacagtgacgccgaaagattttggcaaagtaatgggtctgactgttcaggatattctggaagaaacgtcacgtgagggtattgttctgacgacatcggacaatcctaatctcgtcaagaaagaacttgttcgcatggtgcaggatgtattacgtcccgcatggagggaactggtgtcg

SEQ ID NO: 104 - protein, 343 aa, synthetic construct
  REGION 1..343: note = variant of RNA ligase 2 from Escherichia phage RB69 (Bacteriophage RB69)
MHHHHHHGGSGMFKKYSSLENHYNSKFIEKLYTNGLTTGVWVAREKIHGTNFSLIIERDNVTCAKRTGPILPAEDFYGYEIVLKKYDKAIKTVQKFMYTARAVSYQVFGEFAGGGIQKGVDYGEKDFYVFDILINTESGDNTYLTDYEMQDFCNEFGFKMAPMLGRGTFDSLIMIPNDLDSVLAAYNATASEDLVEANNCVFDANVIGDNTAEGYVLKPCFPKWLPNGTRVAIKCKNSKFSEKKKSDKPIKTQVPLTEIDKNLLDVLACYVTLNRVNNVISKIGTVTPKDFGKVMGLTVQDILEETSREGIVLTTSDNPNLVKKELVRMVQDVLRPAWRELVS

SEQ ID NO: 105 - DNA, 1029 bp, synthetic construct
  misc_feature 1..1029: note = variant of RNA ligase 2 from Escherichia phage RB69 (Bacteriophage RB69)
  source 1..1029: mol_type = other DNA
atgcatcaccatcaccatcacggtggcagcggtatgtttaagaaatattctagtctggaaaaccattacaatagcaaattcattgagaaactctatgctaacggcttaactactggtgtgtgggttgcgcgcgaaaagatccacgggacgaacttttcgctgattatcgagcgtgataatgtaacatgcgccaaacgtacaggcccgattttgcctgcagaagacttctacggttatgaaatcgtcctgaagaaatacgataaagcgattaagacggtgcagaaatttatgtataccgccggcgcggtttcctaccaagtgttcggagaatttgctggcggcggtatccagaaaggtgtcgattatggcgagaaagacttctatgtgtttgatattctgatcaatacggaatcaggagacaacacgtacctgactgattatgaaatgcaggacttctgtaatgaatttgggtttaagatggcaccaatgcttggtcgcggcacattcgatagcctgattatgattccgaacgatttcgattcggttctcgctgcttacaatgcaacggcgagcgaggacctggtagaagcgaacaactgcgtctttgatgccaatgtgatcggtgataacactgctgaaggctatgttcttaaaccgtgtgaacccaaatggttaccgaatgggacgcgtgtggcgatcaaatgcaagaactccaaattcagcgagaagaagaaaagtgacaaaccgatcaagacacaagtcccactgacggaaattgataagaatctgctggacgtattggcctgttacgtcactttaaaccgcgtgaacaacgtgatctctaagattggaacagtgacgccgaaagattttggcaaagtaatgggtctgactgttcaggatattctggaagaaacgtcacgtgagggtattgttctgacgacatcggacaatcctgacctcgtcaagaaagaacttgttcgcatggtgcaggatgtattagaatcggcatggcgcgaactggtgtcg

SEQ ID NO: 106 - protein, 343 aa, synthetic construct
  REGION 1..343: note = variant of RNA ligase 2 from Escherichia phage RB69 (Bacteriophage RB69)
MHHHHHHGGSGMFKKYSSLENHYNSKFIEKLYANGLTTGVWVAREKIHGTNFSLIIERDNVTCAKRTGPILPAEDFYGYEIVLKKYDKAIKTVQKFMYTAGAVSYQVFGEFAGGGIQKGVDYGEKDFYVFDILINTESGDNTYLTDYEMQDFCNEFGFKMAPMLGRGTFDSLIMIPNDFDSVLAAYNATASEDLVEANNCVFDANVIGDNTAEGYVLKPCEPKWLPNGTRVAIKCKNSKFSEKKKSDKPIKTQVPLTEIDKNLLDVLACYVTLNRVNNVISKIGTVTPKDFGKVMGLTVQDILEETSREGIVLTTSDNPDLVKKELVRMVQDVLESAWRELVS

SEQ ID NO: 107 - DNA, 1029 bp, synthetic construct
  misc_feature 1..1029: note = variant of RNA ligase 2 from Escherichia phage RB69 (Bacteriophage RB69)
  source 1..1029: mol_type = other DNA
atgcatcaccatcaccatcacggtggcagcggtatgtttaagaaatattctagtctggaaaaccattacaatagcaaattcattgagaaactctataccaacggcttaactactggtgtgtgggttgcgcgcgaaaagatccacgggacgaacttttcgctgattatcgagcgtgataatgtaacatgcgccaaacgtacaggcccgattaaacctgcagaagacttctacggttatgaaatcgtcctgaagaaatacgataaagcgattaaggctgtgcagaaatttatgtataccgcccgcgcggtttcctaccaagtgttcggagaatttgctggcgggggtatccagaaaggtgtcgattatggcgagaaagacttctatgtgtttgatattctgatcaatacggaatcaggagacaacacgtacctgactgattatgaaatgcaggacttctgtaatgaatttgggtttaagatggcaccaatgcttggtcgcggcacattcgatgaactgattatgattccgaacgatttcgattcggttctcccagcttacaatgcaacggcgagcgaggacctggtagaagcgaacaactgcgtctgggatgccaatgtgatcggtgataacactgctgaaggctatgttcttaaaccgtgtttccccaaatggttaccgaatgggacgcgtgtggcgatcaaatgcaagaactccaaattcagcgagaagaagaaaagtgacaaaccgatcaagacacaagtcccactgacggaaattgataagaatctgctggacgtattggcctgttacgtcactttaaaccgcgtgaacaacgtgatctctaagattggaacagtgacgccgaaagattttggcaaagtaatgggtctgactgttcaggatattctggaagaaacgtcacgtgagggtattgttctgacgacatcggacaatcctaatctcgtcaagaaagaacttgttcgcatggtgcaggatgtattacgtcccgcatggatcgaactggtgtcg

SEQ ID NO: 108 - protein, 343 aa, synthetic construct
  REGION 1..343: note = variant of RNA ligase 2 from Escherichia phage RB69 (Bacteriophage RB69)
MHHHHHHGGSGMFKKYSSLENHYNSKFIEKLYTNGLTTGVWVAREKIHGTNFSLIIERDNVTCAKRTGPIKPAEDFYGYEIVLKKYDKAIKAVQKFMYTARAVSYQVFGEFAGGGIQKGVDYGEKDFYVFDILINTESGDNTYLTDYEMQDFCNEFGFKMAPMLGRGTFDELIMIPNDFDSVLPAYNATASEDLVEANNCVWDANVIGDNTAEGYVLKPCFPKWLPNGTRVAIKCKNSKFSEKKKSDKPIKTQVPLTEIDKNLLDVLACYVTLNRVNNVISKIGTVTPKDFGKVMGLTVQDILEETSREGIVLTTSDNPNLVKKELVRMVQDVLRPAWIELVS

SEQ ID NO: 109 - DNA, 1029 bp, synthetic construct
  misc_feature 1..1029: note = variant of RNA ligase 2 from Escherichia phage RB69 (Bacteriophage RB69)
  source 1..1029: mol_type = other DNA
atgcatcaccatcaccatcacggtggcagcggtatgtttaagaaatattctagtctggaaaaccattacaatagcaaattcattgagaaactctataccaacggcttaactactggtgagtgggttgcgcgcgaaaagatccacgggacgaacttttcgctgattatcgagcgtgataatgtaacatgcgccaaacgtacaggcccgattctgcctgcagaagacttctacggttatgaaatcgtcctgaagaaatacgataaagcgattaaggctgtgcagaaatttatgtataccgcccgcgcggtttcctaccaagtgttcggagaatttgctggcgggggtatccagaaaggtgtcgattatggcgagaaagacttctatgtgtttgatattctgatcaatacggaatcaggagacaacacgtacctgactgattatgaaatgcaggacttctgtaatgaatttgggtttaagatggcaccaatgcttggtcgcggcacattcgatgaactgattatgattccgaacgattttgattcggttctcgcagcttacaatgcaacggcgagcgaggacctggtagaagcgaacaactgcgtctgggatgccaatgtgatcggtgataacactgctgaaggctatgttcttaaaccgtgtttccccaaatggttaccgaatgggacgcgtgtggcgatcaaatgcaagaactccaaattcagcgagaagaagaaaagtgacaaaccgatcaagacacaagtcccactgacggaaattgataagaatctgctggacgtattggcctgttacgtcactttaaaccgcgtgaacaacgtgatctctaagattggaacagtgacgccgaaagattttggcaaagtaatgggtctgactgttcaggatattctggaagaaacgtcacgtgagggtattgttctgacgacatcggacaatcctaatctcgtcaagaaagaacttcagcgcatggtgcaggatgtattacgtcccgcatggatcgaactggtgtcg

SEQ ID NO: 110 - protein, 343 aa, synthetic construct
  REGION 1..343: note = variant of RNA ligase 2 from Escherichia phage RB69 (Bacteriophage RB69)
MHHHHHHGGSGMFKKYSSLENHYNSKFIEKLYTNGLTTGEWVAREKIHGTNFSLIIERDNVTCAKRTGPILPAEDFYGYEIVLKKYDKAIKAVQKFMYTARAVSYQVFGEFAGGGIQKGVDYGEKDFYVFDILINTESGDNTYLTDYEMQDFCNEFGFKMAPMLGRGTFDELIMIPNDFDSVLAAYNATASEDLVEANNCVWDANVIGDNTAEGYVLKPCFPKWLPNGTRVAIKCKNSKFSEKKKSDKPIKTQVPLTEIDKNLLDVLACYVTLNRVNNVISKIGTVTPKDFGKVMGLTVQDILEETSREGIVLTTSDNPNLVKKELQRMVQDVLRPAWIELVS

SEQ ID NO: 111 - DNA, 1029 bp, synthetic construct
  misc_feature 1..1029: note = variant of RNA ligase 2 from Escherichia phage RB69 (Bacteriophage RB69)
  source 1..1029: mol_type = other DNA
atgcatcaccatcaccatcacggtggcagcggtatgtttaagaaatattctagtctggaaaaccattacaatagcaaattcattgagaaactctataccaacggcttaactactggtgtgtgggttgcgcgcgaaaagatccacgggacgaacttttcgctgattatcgagcgtgataatgtaacatgcgccaaacgtacaggcccgattttgcctgcagaagacttctacggttatgaaatcgtcctgaagaaatacgataaagcgattaagacggtgcagaaatttatgtataccgcccgcgcggtttcctaccaagtgttcggagaatttgctggcggcggtatccagaaaggtgtcgattatggcgagaaagacttctatgtgtttgatattctgatcaatacggaatcaggagacaacacgtacctgactgattatgaaatgcaggacttctgtaatgaatttgggtttaagatggcaccaatgcttggtcgcggcacattcgatagcctgattatgattccgaacgatttcgattcggttctcgctgcttacaatgcaacggcgagcgaggacctggtaaaagcgaacaactgcgtctttgatgccaatgtgatcggtgataacactgctgaaggctatgttcttaaaccgtgtttccccaaatggttaccgaatgggacgcgtgtggcgatcaaatgcaagaactccaaattcagcgagaagaagaaaagtgacaaaccgatcaagacacaagtcccactgacggaaattgataagaatctgctggacgtattggcctgttacgtcactttaaaccgcgtgaacaacgtgatctctaagattggaacagtgacgccgaaagattttggcaaagtaatgggtctgactgttaaggatattctggaagaaacgtcacgtgagggtattgttctgacgacatcggacaatcctaatctcgtcaagaaagaacttgttcgcatggtgcaggatgtattagaaccggcatggcgcgaactggtgtcg

SEQ ID NO: 112 - protein, 343 aa, synthetic construct
  REGION 1..343: note = variant of RNA ligase 2 from Escherichia phage RB69 (Bacteriophage RB69)
MHHHHHHGGSGMFKKYSSLENHYNSKFIEKLYTNGLTTGVWVAREKIHGTNFSLIIERDNVTCAKRTGPILPAEDFYGYEIVLKKYDKAIKTVQKFMYTARAVSYQVFGEFAGGGIQKGVDYGEKDFYVFDILINTESGDNTYLTDYEMQDFCNEFGFKMAPMLGRGTFDSLIMIPNDFDSVLAAYNATASEDLVKANNCVFDANVIGDNTAEGYVLKPCFPKWLPNGTRVAIKCKNSKFSEKKKSDKPIKTQVPLTEIDKNLLDVLACYVTLNRVNNVISKIGTVTPKDFGKVMGLTVKDILEETSREGIVLTTSDNPNLVKKELVRMVQDVLEPAWRELVS

SEQ ID NO: 113 - DNA, 1029 bp, synthetic construct
  misc_feature 1..1029: note = variant of RNA ligase 2 from Escherichia phage RB69 (Bacteriophage RB69)
  source 1..1029: mol_type = other DNA
atgcatcaccatcaccatcacggtggcagcggtatgtttaagaaatattctagtctggaaaaccattacaatagcaaattcattgagaaactctatgctaacggcttaactactggtgtgtgggttgcgcgcgaaaagatccacgggacgaacttttcgctgattatcgagcgtgataatgtaacatgcgccaaacgtacaggcccgattttgcctgcagaagacttctacggttatgaaatcgtcctgaagaaatacgataaagcgattaagacggtgcagaaatttatgtataccgcccgcgcggtttcctaccaagtgttcggagaatttgctggcggcggtatccagaaaggtgtcgattatggcgagaaagacttctatgtgtttgatattctgatcaatacggaatcaggagacaacacgtacctgactgattatgaaatgcaggacttctgtaatgaatttgggtttaagatggcaccaatgcttggtcgcggcacattcgatagcctgattatgattccgaacgatttcgattcggttctccgcgcttacaatgcaacggcgagcgaggacctggtagaagcgaacaactgcgtctttgatgccaatgtgattggtgataacactgctgaaggctatgttcttaaaccgtgtgaacccaaatggttaccgaatgggacgcgtgtggcgatcaaatgcaagaactccaaattcagcgagaagaagaaaagtgacaaaccgatcaagacacaagtcccactgacggaaattgataagaatctgctggacgtattggcctgttacgtcactttaaaccgcgtgaacaacgtgatctctaagattggaacagtgacgccgaaagattttggcaaagtaatgggtctgactgttaaggatattctggaagaaacgtcacgtgagggtattgttctgacgacatcggacaatcctgacctcgtcaagaaagaacttgttcgcatggtgcaggatgtattacgtcccgcatggatcgaactggtgtcg

SEQ ID NO: 114 - protein, 343 aa, synthetic construct
  REGION 1..343: note = variant of RNA ligase 2 from Escherichia phage RB69 (Bacteriophage RB69)
MHHHHHHGGSGMFKKYSSLENHYNSKFIEKLYANGLTTGVWVAREKIHGTNFSLIIERDNVTCAKRTGPILPAEDFYGYEIVLKKYDKAIKTVQKFMYTARAVSYQVFGEFAGGGIQKGVDYGEKDFYVFDILINTESGDNTYLTDYEMQDFCNEFGFKMAPMLGRGTFDSLIMIPNDFDSVLRAYNATASEDLVEANNCVFDANVIGDNTAEGYVLKPCEPKWLPNGTRVAIKCKNSKFSEKKKSDKPIKTQVPLTEIDKNLLDVLACYVTLNRVNNVISKIGTVTPKDFGKVMGLTVKDILEETSREGIVLTTSDNPDLVKKELVRMVQDVLRPAWIELVS

SEQ ID NO: 115 - DNA, 1029 bp, synthetic construct
  misc_feature 1..1029: note = variant of RNA ligase 2 from Escherichia phage RB69 (Bacteriophage RB69)
  source 1..1029: mol_type = other DNA
atgcatcaccatcaccatcacggtggcagcggtatgtttaagaaatattctagtctggaaaaccattacaatagcaaattcattgagaaactctataccaacggcttaactactggtgtgtgggttgcgcgcgaaaagatccacgggacgaacttttcgctgattatcgagcgtgataatgtaacatgcgccaaacgtacaggcccgattttgcctgcagaagacttctacggttatgaaatcgtcctgaagaaatacgataaagcgattaagacggtgcagaaatttatgtataccgcccgcgcggtttcctaccaagtgttcggagaatttgctggcggcggtatccagaaaggtgtcgattatggcgagaaagacttctatgtgtttgatattctgatcaatacggaatcaggagacaacacgtacctgactgattatgaaatgcaggacttctgtaatgaatttgggtttaagatggcaccaatgcttggtcgcggcacattcgatagcctgattatgattccgaacgatttcgattcggttctcgccgcttacaatgcaacggcgagcgaggacctggtagaagcgaacaactgcgtctttgatgccaatgtgatcggtgataacactgctgaaggctatgttcttaaaccgtgtttccccaaatggttaccgaatgggacgcgtgtggcgatcaaatgcaagaactccaaattcagcgagaagaagaaaagtgacaaaccgatcaagacacaagtcccactgacggaaattgataagaatctgctggacgtattggcctgttacgtcactttaaaccgcgtgaacaacgtgatctctaagattggaacagtgacgccgaaagattttggcaaagtaatgggtctgactgttcaggatattctggaagaaacgtcacgtgagggtattgttctgacgacatcggacaatcctaatctcgtcaagaaagaacttgttcgcatggtgcaggatgtattagaatcggcatggcgcgaactggtgtcg

SEQ ID NO: 116 - protein, 343 aa, synthetic construct
  REGION 1..343: note = variant of RNA ligase 2 from Escherichia phage RB69 (Bacteriophage RB69)
MHHHHHHGGSGMFKKYSSLENHYNSKFIEKLYTNGLTTGVWVAREKIHGTNFSLIIERDNVTCAKRTGPILPAEDFYGYEIVLKKYDKAIKTVQKFMYTARAVSYQVFGEFAGGGIQKGVDYGEKDFYVFDILINTESGDNTYLTDYEMQDFCNEFGFKMAPMLGRGTFDSLIMIPNDFDSVLAAYNATASEDLVEANNCVFDANVIGDNTAEGYVLKPCFPKWLPNGTRVAIKCKNSKFSEKKKSDKPIKTQVPLTEIDKNLLDVLACYVTLNRVNNVISKIGTVTPKDFGKVMGLTVQDILEETSREGIVLTTSDNPNLVKKELVRMVQDVLESAWRELVS

SEQ ID NO: 117 - DNA, 1029 bp, synthetic construct
  misc_feature 1..1029: note = variant of RNA ligase 2 from Escherichia phage RB69 (Bacteriophage RB69)
  source 1..1029: mol_type = other DNA
atgcatcaccatcaccatcacggtggcagcggtatgtttaagaaatattctagtctggaaaaccattacaatagcaaattcattgagaaactctataccaacggcttaactactggtgtgtgggttgcgcgcgaaaagatccacgggacgaacttttcgctgattatcgagcgtgataatgtaacatgcgccaaacgtacaggcccgattttgcctgcagaagacttctacggttatgaaatcgtcctgaagaaatacgataaagcgattaagacggtgcagaaatttatgtataccgcccgcgcggtttcctaccaagtgttcggagaatttgctggcggcggtatccagaaaggtgtcgattatggcgagaaagacttctatgtgtttgatattctgatcaatacggaatcaggagacaacacgtacctgactgattatgaaatgcaggacttctgtaatgaatttgggtttaagatggcaccaatgcttggtcgcggcacattcgatagcctgattatgattccgaacgatttcgattcggttctccctgcttacaatgcaacggcgagcgaggacctggtaaaagcgaacaactgcgtctttgatgccaatgtgatcggtgataacactgctgaaggctatgttcttaaaccgtgtgaacccaaatggttaccgaatgggacgcgtgtggcgatcaaatgcaagaactccaaattcagcgagaagaagaaaagtgacaaaccgatcaagacacaagtcccactgacggaaattgataagaatctgctggacgtattggcctgttacgtcactttaaaccgcgtgaacaacgtgatctctaagattggaacagtgacgccgaaagattttggcaaagtaatgggtctgactgttcaggatattctggaagaaacgtcacgtgagggtattgttctgacgacatcggacaatcctaacctcgtcaagaaagaacttgttcgcatggtgcaggatgtattacgctcggcatggatcgaactggtgtcg

SEQ ID NO: 118 - protein, 343 aa, synthetic construct
  REGION 1..343: note = variant of RNA ligase 2 from Escherichia phage RB69 (Bacteriophage RB69)
MHHHHHHGGSGMFKKYSSLENHYNSKFIEKLYTNGLTTGVWVAREKIHGTNFSLIIERDNVTCAKRTGPILPAEDFYGYEIVLKKYDKAIKTVQKFMYTARAVSYQVFGEFAGGGIQKGVDYGEKDFYVFDILINTESGDNTYLTDYEMQDFCNEFGFKMAPMLGRGTFDSLIMIPNDFDSVLPAYNATASEDLVKANNCVFDANVIGDNTAEGYVLKPCEPKWLPNGTRVAIKCKNSKFSEKKKSDKPIKTQVPLTEIDKNLLDVLACYVTLNRVNNVISKIGTVTPKDFGKVMGLTVQDILEETSREGIVLTTSDNPNLVKKELVRMVQDVLRSAWIELVS

SEQ ID NO: 119 - DNA, 1029 bp, synthetic construct
  misc_feature 1..1029: note = variant of RNA ligase 2 from Escherichia phage RB69 (Bacteriophage RB69)
  source 1..1029: mol_type = other DNA
atgcatcaccatcaccatcacggtggcagcggtatgtttaagaaatattctagtctggaaaaccattacaatagcaaattcattgagaaactctataaaaacggcttaactactggtgtgtgggttgcgcgcgaaaagatccacgggacgaacttttcgctgattatcgagcgtgataatgtaacatgcgccaaacgtacaggcccgattttgcctgcagaagacttctacggttatgaaatcgtcctgaagaaatacgataaagcgattaagacggtgcagaaatttatgtataccgcccgcgcggtttcctaccaagtgttcggagaatttgctggcggcggtatccagaaaggtgtcgattatggcgagaaagacttctatgtgtttgatattctgatcaatacggaatcaggagacaacacgtacctgactgattatgaaatgcaggacttctgtaatgaatttgggtttaagatggcaccaatgcttggtcgcggcacattcgatagcctgattatgattccgaacgatttcgattcggttctccgcgcttacaatgcaacggcgagcgaggacctggtagaagcgaacaactgcgtctttgatgccaatgtgatcggtgataacactgctgaaggctatgttcttaaaccgtgtttccccaaatggttaccgaatgggacgcgtgtggcgatcaaatgcaagaactccaaattcagcgagaagaagaaaagtgacaaaccgatcaagacacaagtcccactgacggaaattgataagaatctgctggacgtattggcctgttacgtcactttaaaccgcgtgaacaacgtgatctctaagattggaacagtgacgccgaaagattttggcaaagtaatgggtctgactgttcaggatattctggaagaaacgtcacgtgagggtattgttctgacgacatcggacaatcctgacctcgtcaagaaagaacttgttcgcatggtgcaggatgtattagaatcggcatggatcgaactggtgtcg

SEQ ID NO: 120 - protein, 343 aa, synthetic construct
  REGION 1..343: note = variant of RNA ligase 2 from Escherichia phage RB69 (Bacteriophage RB69)
MHHHHHHGGSGMFKKYSSLENHYNSKFIEKLYKNGLTTGVWVAREKIHGTNFSLIIERDNVTCAKRTGPILPAEDFYGYEIVLKKYDKAIKTVQKFMYTARAVSYQVFGEFAGGGIQKGVDYGEKDFYVFDILINTESGDNTYLTDYEMQDFCNEFGFKMAPMLGRGTFDSLIMIPNDFDSVLRAYNATASEDLVEANNCVFDANVIGDNTAEGYVLKPCFPKWLPNGTRVAIKCKNSKFSEKKKSDKPIKTQVPLTEIDKNLLDVLACYVTLNRVNNVISKIGTVTPKDFGKVMGLTVQDILEETSREGIVLTTSDNPDLVKKELVRMVQDVLESAWIELVS

SEQ ID NO: 121 - DNA, 1029 bp, synthetic construct
  misc_feature 1..1029: note = variant of RNA ligase 2 from Escherichia phage RB69 (Bacteriophage RB69)
  source 1..1029: mol_type = other DNA
atgcatcaccatcaccatcacggtggcagcggtatgtttaagaaatattctagtctggaaaaccattacaatagcaaattcattgagaaactctataccaacggcttaactactggtgtgtgggttgcgcgcgaaaagatccacgggacgaacttttcgctgattatcgagcgtgataatgtaacatgcgccaaacgtacaggcccgattttgcctgcagaagacttctacggttatgaaatcgtcctgaagaaatacgataaagcgattaagacggtgcagaaatttatgtataccgcccgcgcggtttcctaccaagtgttcggagaatttgctggcggcggtatccagaaaggtgtcgattatggcgagaaagacttctatgtgtttgatattctgatcaatacggaatcaggagacaacacgtacctgactgattatgaaatgcaggacttctgtaatgaatttgggtttaagatggcaccaatgcttggtcgcggcacattcgatagcctgattatgattccgaacgatttcgattcggttctcgccgcttacaatgcaacggcgagcgaggacctggtagaagcgaacaactgcgtctttgatgccaatgtgactggtctgaacactgctgaaggctatgttcttaaaccgtgtgaacccaaatggttaccgaatgggacgcgtgtggcgatcaaatgcaagaactccaaattcagcgagaagaagaaaagtgacaaaccgatcaagacacaagtcccactgacggaaattgataagaatctgctggacgtattggcctgttacgtcactttaaaccgcgtgaacaacgtgatctctaagattggaacagtgacgccgaaagattttggcaaagtaatgggtctgactgttaaggatattctggaagaaacgtcacgtgagggtattgttctgacgacatcggacaatcctgacctcgtcaagaaagaacttgttcgcatggtgcaggatgtattacgctcggcatggcgcgaactggtgtcg

SEQ ID NO: 122 - protein, 343 aa, synthetic construct
  REGION 1..343: note = variant of RNA ligase 2 from Escherichia phage RB69 (Bacteriophage RB69)
MHHHHHHGGSGMFKKYSSLENHYNSKFIEKLYTNGLTTGVWVAREKIHGTNFSLIIERDNVTCAKRTGPILPAEDFYGYEIVLKKYDKAIKTVQKFMYTARAVSYQVFGEFAGGGIQKGVDYGEKDFYVFDILINTESGDNTYLTDYEMQDFCNEFGFKMAPMLGRGTFDSLIMIPNDFDSVLAAYNATASEDLVEANNCVFDANVTGLNTAEGYVLKPCEPKWLPNGTRVAIKCKNSKFSEKKKSDKPIKTQVPLTEIDKNLLDVLACYVTLNRVNNVISKIGTVTPKDFGKVMGLTVKDILEETSREGIVLTTSDNPDLVKKELVRMVQDVLRSAWRELVS

SEQ ID NO: 123 - DNA, 1029 bp, synthetic construct
  misc_feature 1..1029: note = variant of RNA ligase 2 from Escherichia phage RB69 (Bacteriophage RB69)
  source 1..1029: mol_type = other DNA
atgcatcaccatcaccatcacggtggcagcggtatgtttaagaaatattctagtctggaaaaccattacaatagcaaattcattgagaaactctataccaacggcttaactactggtgtgtgggttgcgcgcgaaaagatccacgggacgaacttttcgctgattatcgagcgtgataatgtaacatgcgccaaacgtacaggcccgattttgcctgcagaagacttctacggttatgaaatcgtcctgaagaaatacgataaagcgattaagacggtgcagaaatttatgtataccgccggcgcggtttcctaccaagtgttcggagaatttgctggcggcggtatccagaaaggtgtcgattatggcgagaaagacttctatgtgtttgatattctgatcaatacggaatcaggagacaacacgtacctgactgattatgaaatgcaggacttctgtaatgaatttgggtttaagatggcaccaatgcttggtcgcggcacattcgatagcctgattatgattccgaacgatttcgattcggttctcgccgcttacaatgcaacggcgagcgaggacctggtaaaagcgaacaactgcgtctttgatgccaatgtgattggtgataacactgctgaaggctatgttcttaaaccgtgtgaacccaaatggttaccgaatgggacgcgtgtggcgatcaaatgcaagaactccaaattcagcgagaagaagaaaagtgacaaaccgatcaagacacaagtcccactgacggaaattgataagaatctgctggacgtattggcctgttacgtcactttaaaccgcgtgaacaacgtgatctctaagattggaacagtgacgccgaaagattttggcaaagtaatgggtctgactgttaaggatattctggaagaaacgtcacgtgagggtattgttctgacgacatcggacaatcctaatctcgtcaagaaagaacttgttcgcatggtgcaggatgtattagaaccggcatggatcgaactggtgtcg

SEQ ID NO: 124 - protein, 343 aa, synthetic construct
  REGION 1..343: note = variant of RNA ligase 2 from Escherichia phage RB69 (Bacteriophage RB69)
MHHHHHHGGSGMFKKYSSLENHYNSKFIEKLYTNGLTTGVWVAREKIHGTNFSLIIERDNVTCAKRTGPILPAEDFYGYEIVLKKYDKAIKTVQKFMYTAGAVSYQVFGEFAGGGIQKGVDYGEKDFYVFDILINTESGDNTYLTDYEMQDFCNEFGFKMAPMLGRGTFDSLIMIPNDFDSVLAAYNATASEDLVKANNCVFDANVIGDNTAEGYVLKPCEPKWLPNGTRVAIKCKNSKFSEKKKSDKPIKTQVPLTEIDKNLLDVLACYVTLNRVNNVISKIGTVTPKDFGKVMGLTVKDILEETSREGIVLTTSDNPNLVKKELVRMVQDVLEPAWIELVS

SEQ ID NO: 125 - DNA, 1029 bp, synthetic construct
  misc_feature 1..1029: note = variant of RNA ligase 2 from Escherichia phage RB69 (Bacteriophage RB69)
  source 1..1029: mol_type = other DNA
atgcatcaccatcaccatcacggtggcagcggtatgtttaagaaatattctagtctggaaaaccattacaatagcaaattcattgagaaactctatactaacggcttaactactggtgtgtgggttgcgcgcgaaaagatccacgggacgaacttttcgctgattatcgagcgtgataatgtaacatgcgccaaacgtacaggcccgattttgcctgcagaagacttctacggttatgaaatcgtcctgaagaaatacgataaagcgattaagacggtgcagaaatttatgtataccgcccgcgcggtttcctaccaagtgttcggagaatttgctggcggcggtatccagaaaggtgtcgattatggcgagaaagacttctatgtgtttgatattctgatcaatacggaatcaggagacaacacgtacctgactgattatgaaatgcaggacttctgtaatgaatttgggtttaagatggcaccaatgcttggtcgcggcacattcgatagcctgattatgattccgaacgatttcgattcggttctcgctgcttacaatgcaacggcgagcgaggacctggtagaagcgaacaactgcgtctttgatgccaatgtgactggtctgaacactgctgaaggctatgttcttaaaccgtgtttccccaaatggttaccgaatgggacgcgtgtggcgatcaaatgcaagaactccaaattcagcgagaagaagaaaagtgacaaaccgatcaagacacaagtcccactgacggaaattgataagaatctgctggacgtattggcctgttacgtcactttaaaccgcgtgaacaacgtgatctctaagattggaacagtgacgccgaaagattttggcaaagtaatgggtctgactgttaaggatattctggaagaaacgtcacgtgagggtattgttctgacgacatcggacaatcctgacctcgtcaagaaagaacttgttcgcatggtgcaggatgtattacgtcccgcatggatcgaactggtgtcg

SEQ ID NO: 126 - protein, 343 aa, synthetic construct
  REGION 1..343: note = variant of RNA ligase 2 from Escherichia phage RB69 (Bacteriophage RB69)
MHHHHHHGGSGMFKKYSSLENHYNSKFIEKLYTNGLTTGVWVAREKIHGTNFSLIIERDNVTCAKRTGPILPAEDFYGYEIVLKKYDKAIKTVQKFMYTARAVSYQVFGEFAGGGIQKGVDYGEKDFYVFDILINTESGDNTYLTDYEMQDFCNEFGFKMAPMLGRGTFDSLIMIPNDFDSVLAAYNATASEDLVEANNCVFDANVTGLNTAEGYVLKPCFPKWLPNGTRVAIKCKNSKFSEKKKSDKPIKTQVPLTEIDKNLLDVLACYVTLNRVNNVISKIGTVTPKDFGKVMGLTVKDILEETSREGIVLTTSDNPDLVKKELVRMVQDVLRPAWIELVS

SEQ ID NO: 127 - DNA, 1029 bp, synthetic construct
  misc_feature 1..1029: note = variant of RNA ligase 2 from Escherichia phage RB69 (Bacteriophage RB69)
  source 1..1029: mol_type = other DNA
atgcatcaccatcaccatcacggtggcagcggtatgtttaagaaatattctagtctggaaaaccattacaatagcaaattcattgagaaactctataccaacggcttaactactggtgagtgggttgcgcgcgaaaagatccacgggacgaacttttcgctgattatcgagcgtgataatgtaacatgcgccaaacgtacaggcccgattctgcctgcagaagacttctacggttatgaaatcgtcctgaagaaatacgataaagcgattaagacggtgcagaaatttatgtataccgcccgcgcggtttcctaccaagtgttcggagaatttgctggcggcggtatccagaaaggtgtcgattatggcgagaaagacttctatgtgtttgatattctgatcaatacggaatcaggagacaacacgtacctgactgattatgaaatgcaggacttctgtaatgaatttgggtttaagatggcaccaatgcttggtcgcggcacattcgaagaactgattatgattccgaacgatttcgattcggttctcgcagcttacaatgcaacggcgagcgaggacctggtagaagcgaacaactgcgtctgggatgccaatgtgatcggtgataacactgctgaaggctatgttcttaaaccgtgtttccccaaatggttaccgaatgggacgcgtgtggcgatcaaatgcaagaactccaaattcagcgagaagaagaaaagtgacaaaccgatcaagacacaagtcccactgacggaaattgataagaatctgctggacgtattggcctgttacgtcactttaaaccgcgtgaacaacgtgatctctaagattggaacagtgacgccgaaagattttggcaaagtaatgggtctgactgttcaggatattctggaagaaacgtcacgtgagggtattgttctgacgacatcggacaatcctaatctcgtcaagaaagaacttcagcgcatggtgcaggatgtattacgtcccgcatggatcgaactggtctcg

SEQ ID NO: 128 - protein, 343 aa, synthetic construct
  REGION 1..343: note = variant of RNA ligase 2 from Escherichia phage RB69 (Bacteriophage RB69)
MHHHHHHGGSGMFKKYSSLENHYNSKFIEKLYTNGLTTGEWVAREKIHGTNFSLIIERDNVTCAKRTGPILPAEDFYGYEIVLKKYDKAIKTVQKFMYTARAVSYQVFGEFAGGGIQKGVDYGEKDFYVFDILINTESGDNTYLTDYEMQDFCNEFGFKMAPMLGRGTFEELIMIPNDFDSVLAAYNATASEDLVEANNCVWDANVIGDNTAEGYVLKPCFPKWLPNGTRVAIKCKNSKFSEKKKSDKPIKTQVPLTEIDKNLLDVLACYVTLNRVNNVISKIGTVTPKDFGKVMGLTVQDILEETSREGIVLTTSDNPNLVKKELQRMVQDVLRPAWIELVS

SEQ ID NO: 129 - DNA, 1029 bp, synthetic construct
  misc_feature 1..1029: note = variant of RNA ligase 2 from Escherichia phage RB69 (Bacteriophage RB69)
  source 1..1029: mol_type = other DNA
atgcatcaccatcaccatcacggtggcagcggtatgtttaagaaatattctagtctggaaaaccattacaatagcaaattcattgagaaactctataaaaacggcttaactactggtgtgtgggttgcgcgcgaaaagatccacgggacgaacttttcgctgattatcgagcgtgataatgtaacatgcgccaaacgtacaggcccgattttgcctgcagaagacttctacggttatgaaatcgtcctgaagaaatacgataaagcgattaagacggtgcagaaatttatgtataccgccggcgcggtttcctaccaagtgttcggagaatttgctggcggcggtatccagaaaggtgtcgattatggcgagaaagacttctatgtgtttgatattctgatcaatacggaatcaggagacaacacgtacctgactgattatgaaatgcaggacttctgtaatgaatttgggtttaagatggcaccaatgcttggtcgcggcacattcgatagcctgattatgattccgaacgatttcgattcggttctccgcgcttacaatgcaacggcgagcgaggacctggtaaaagcgaacaactgcgtctttgatgccaatgtgattggtctgaacactgctgaaggctatgttcttaaaccgtgtttccccaaatggttaccgaatgggacgcgtgtggcgatcaaatgcaagaactccaaattcagcgagaagaagaaaagtgacaaaccgatcaagacacaagtcccactgacggaaattgataagaatctgctggacgtattggcctgttacgtcactttaaaccgcgtgaacaacgtgatctctaagattggaacagtgacgccgaaagattttggcaaagtaatgggtctgactgttcaggatattctggaagaaacgtcacgtgagggtattgttctgacgacatcggacaatcctaatctcgtcaagaaagaacttgttcgcatggtgcaggatgtattacgctcggcatggcgcgaactggtgtcg

SEQ ID NO: 130 - protein, 343 aa, synthetic construct
  REGION 1..343: note = variant of RNA ligase 2 from Escherichia phage RB69 (Bacteriophage RB69)
MHHHHHHGGSGMFKKYSSLENHYNSKFIEKLYKNGLTTGVWVAREKIHGTNFSLIIERDNVTCAKRTGPILPAEDFYGYEIVLKKYDKAIKTVQKFMYTAGAVSYQVFGEFAGGGIQKGVDYGEKDFYVFDILINTESGDNTYLTDYEMQDFCNEFGFKMAPMLGRGTFDSLIMIPNDFDSVLRAYNATASEDLVKANNCVFDANVIGLNTAEGYVLKPCFPKWLPNGTRVAIKCKNSKFSEKKKSDKPIKTQVPLTEIDKNLLDVLACYVTLNRVNNVISKIGTVTPKDFGKVMGLTVQDILEETSREGIVLTTSDNPNLVKKELVRMVQDVLRSAWRELVS

SEQ ID NO: 131 - DNA, 1029 bp, synthetic construct
  misc_feature 1..1029: note = variant of RNA ligase 2 from Escherichia phage RB69 (Bacteriophage RB69)
  source 1..1029: mol_type = other DNA
atgcatcaccatcaccatcacggtggcagcggtatgtttaagaaatattctagtctggaaaaccattacaatagcaaattcattgagaaactctataccaacggcttaactactggtgagtgggttgcgcgcgaaaagatccacgggacgaacttttcgctgattatcgagcgtgataatgtaacatgcgccaaacgtacaggcccgattaaacctgcagaagacttctacggttatgaaatcgtcctgaagaaatacgataaagcgattaaggctgtgcagaaatttatgtataccgcccgcgcggtttcctaccaagtgttcggagaatttgctggcgggggtatccagaaaggtgtcgattatggcgagaaagacttctatgtgtttgatattctgatcaatacggaatcaggagacaacacgtacctgactgattatgaaatgcaggacttctgtaatgaatttgggtttaagatggcaccaatgcttggtcgcggcacattcgatgaactgattatgattccgaacgattttgattcggttctcccagcttacaatgcaacggcgagcgaggacctggtagaagcgaacaactgcgtcttcgatgccaatgtgatcggtgataacactgctgaaggctatgttcttaaaccgtgtttccccaaatggttaccgaatgggacgcgtgtggcgatcaaatgcaagaactccaaattcagcgagaagaagaaaagtgacaaaccgatcaagacacaagtcccactgacggaaattgataagaatctgctggacgtattggcctgttacgtcactttaaaccgcgtgaacaacgtgatctctaagattggaacagtgacgccgaaagattttggcaaagtaatgggtctgactgttcaggatattctggaagaaacgtcacgtgagggtattgttctgacgacatcggacaatcctaatctcgtcaagaaagaacttcagcgcatggtgcaggatgtattacgtcccgcatggatcgaactggtctcg

SEQ ID NO: 132 - protein, 343 aa, synthetic construct
  REGION 1..343: note = variant of RNA ligase 2 from Escherichia phage RB69 (Bacteriophage RB69)
MHHHHHHGGSGMFKKYSSLENHYNSKFIEKLYTNGLTTGEWVAREKIHGTNFSLIIERDNVTCAKRTGPIKPAEDFYGYEIVLKKYDKAIKAVQKFMYTARAVSYQVFGEFAGGGIQKGVDYGEKDFYVFDILINTESGDNTYLTDYEMQDFCNEFGFKMAPMLGRGTFDELIMIPNDFDSVLPAYNATASEDLVEANNCVFDANVIGDNTAEGYVLKPCFPKWLPNGTRVAIKCKNSKFSEKKKSDKPIKTQVPLTEIDKNLLDVLACYVTLNRVNNVISKIGTVTPKDFGKVMGLTVQDILEETSREGIVLTTSDNPNLVKKELQRMVQDVLRPAWIELVS

SEQ ID NO: 133 - DNA, 1029 bp, synthetic construct
  misc_feature 1..1029: note = variant of RNA ligase 2 from Escherichia phage RB69 (Bacteriophage RB69)
  source 1..1029: mol_type = other DNA
atgcatcaccatcaccatcacggtggcagcggtatgtttaagaaatattctagtctggaaaaccattacaatagcaaattcattgagaaactctataccaacggcttaactactggtgtgtgggttgcgcgcgaaaagatccacgggacgaacttttcgctgattatcgagcgtgataatgtaacatgcgccaaacgtacaggcccgattttgcctgcagaagacttctacggttatgaaatcgtcctgaagaaatacgataaagcgattaagacggtgcagaaatttatgtataccgcccgcgcggtttcctaccaagtgttcggagaatttgctggcggcggtatccagaaaggtgtcgattatggcgagaaagacttctatgtgtttgatattctgatcaatacggaatcaggagacaacacgtacctgactgattatgaaatgcaggacttctgtaatgaatttgggtttaagatggcaccaatgcttggtcgcggcacattcgatagcctgattatgattccgaacgatttcgattcggttctcgccgcttacaatgcaacggcgagcgaggacctggtagaagcgaacaactgcgtctttgatgccaatgtgactggtgataacactgctgaaggctatgttcttaaaccgtgttttcccaaatggttaccgaatgggacgcgtgtggcgatcaaatgcaagaactccaaattcagcgagaagaagaaaagtgacaaaccgatcaagacacaagtcccactgacggaaattgataagaatctgctggacgtattggcctgttacgtcactttaaaccgcgtgaacaacgtgatctctaagattggaacagtgacgccgaaagattttggcaaagtaatgggtctgactgttcaggatattctggaagaaacgtcacgtgagggtattgttctgacgacatcggacaatcctaacctcgtcaagaaagaacttgttcgcatggtgcaggatgtattagaatcggcatggcgcgaactggtgtcg

SEQ ID NO: 134 - protein, 343 aa, synthetic construct
  REGION 1..343: note = variant of RNA ligase 2 from Escherichia phage RB69 (Bacteriophage RB69)
MHHHHHHGGSGMFKKYSSLENHYNSKFIEKLYTNGLTTGVWVAREKIHGTNFSLIIERDNVTCAKRTGPILPAEDFYGYEIVLKKYDKAIKTVQKFMYTARAVSYQVFGEFAGGGIQKGVDYGEKDFYVFDILINTESGDNTYLTDYEMQDFCNEFGFKMAPMLGRGTFDSLIMIPNDFDSVLAAYNATASEDLVEANNCVFDANVTGDNTAEGYVLKPCFPKWLPNGTRVAIKCKNSKFSEKKKSDKPIKTQVPLTEIDKNLLDVLACYVTLNRVNNVISKIGTVTPKDFGKVMGLTVQDILEETSREGIVLTTSDNPNLVKKELVRMVQDVLESAWRELVS

SEQ ID NO: 135 - DNA, 1029 bp, synthetic construct
  misc_feature 1..1029: note = variant of RNA ligase 2 from Escherichia phage RB69 (Bacteriophage RB69)
  source 1..1029: mol_type = other DNA
atgcatcaccatcaccatcacggtggcagcggtatgtttaagaaatattctagtctggaaaaccattacaatagcaaattcattgagaaactctataaaaacggcttaactactggtgtgtgggttgcgcgcgaaaagatccacgggacgaacttttcgctgattatcgagcgtgataatgtaacatgcgccaaacgtacaggcccgattttgcctgcagaagacttctacggttatgaaatcgtcctgaagaaatacgataaagcgattaagacggtgcagaaatttatgtataccgccggcgcggtttcctaccaagtgttcggagaatttgctggcggcggtatccagaaaggtgtcgattatggcgagaaagacttctatgtgtttgatattctgatcaatacggaatcaggagacaacacgtacctgactgattatgaaatgcaggacttctgtaatgaatttgggtttaagatggcaccaatgcttggtcgcggcacattcgatagcctgattatgattccgaacgatttcgattcggttctcgccgcttacaatgcaacggcgagcgaggacctggtaaaagcgaacaactgcgtctttgatgccaatgtgatcggtgataacactgctgaaggctatgttcttaaaccgtgttttcccaaatggttaccgaatgggacgcgtgtggcgatcaaatgcaagaactccaaattcagcgagaagaagaaaagtgacaaaccgatcaagacacaagtcccactgacggaaattgataagaatctgctggacgtattggcctgttacgtcactttaaaccgcgtgaacaacgtgatctctaagattggaacagtgacgccgaaagattttggcaaagtaatgggtctgactgttaaggatattctggaagaaacgtcacgtgagggtattgttctgacgacatcggacaatcctgacctcgtcaagaaagaacttgttcgcatggtgcaggatgtattagaatcggcatggcgcgaactggtgtcg

SEQ ID NO: 136 - protein, 343 aa, synthetic construct
  REGION 1..343: note = variant of RNA ligase 2 from Escherichia phage RB69 (Bacteriophage RB69)
MHHHHHHGGSGMFKKYSSLENHYNSKFIEKLYKNGLTTGVWVAREKIHGTNFSLIIERDNVTCAKRTGPILPAEDFYGYEIVLKKYDKAIKTVQKFMYTAGAVSYQVFGEFAGGGIQKGVDYGEKDFYVFDILINTESGDNTYLTDYEMQDFCNEFGFKMAPMLGRGTFDSLIMIPNDFDSVLAAYNATASEDLVKANNCVFDANVIGDNTAEGYVLKPCFPKWLPNGTRVAIKCKNSKFSEKKKSDKPIKTQVPLTEIDKNLLDVLACYVTLNRVNNVISKIGTVTPKDFGKVMGLTVKDILEETSREGIVLTTSDNPDLVKKELVRMVQDVLESAWRELVS

SEQ ID NO: 137 - DNA, 1029 bp, synthetic construct
  misc_feature 1..1029: note = variant of RNA ligase 2 from Escherichia phage RB69 (Bacteriophage RB69)
  source 1..1029: mol_type = other DNA
atgcatcaccatcaccatcacggtggcagcggtatgtttaagaaatattctagtctggaaaaccattacaatagcaaattcattgagaaactctataccaacggcttaactactggtgtgtgggttgcgcgcgaaaagatccacgggacgaacttttcgctgattatcacccgtgataatgtaacatgcgccaaacgtacaggcccgattttgcctgcagaagacttctacggttatgaaatcgtcctgaagaaatacgataaagcgattaagactgtgcagaaatttatgtataccgcccgcgcggtttcctaccaagtgttcggagaatttgctggcgggggtatccagaaaggtgtcgattatggcgagaaagacttctatgtgtttgatattctgatcaatacggaatcaggagacaacacgtacctgactgattatgaaatgcaggacttctgtaatgaatttgggtttaagatggcaccaatgcttggtcgcggcacattcgatgaactgattatgattccgaacgatttggattcggttctcccagcttacaatgcaacggcgagcgaggacctggtagaagcgaacaactgcgtctgggatgccaatgtgatcggtgacaacactgctgaaggctatgttcttaaaccgtgtttccccaaatggttaccgaatgggacgcgtgtggcgatcaaatgcaagaactccaaattcagcgagaagaagaaaagtgacaaaccgatcaagacacaagtcccactgacggaaattgataagaatctgctggacgtattggcctgttacgtcactttaaaccgcgtgaacaacgtgatctctaagattggaacagtgacgccgaaagattttggcaaagtaatgggtctgactgttcaggatattctggaagaaacgtcacgtgagggtattgttctgacgacatcggacaatcctaatctcgtcaagaaagaacttcagcgcatggtgcaggatgtattacgtcccgcatggatcgaactggtgtcg

SEQ ID NO: 138 - protein, 343 aa, synthetic construct
  REGION 1..343: note = variant of RNA ligase 2 from Escherichia phage RB69 (Bacteriophage RB69)
MHHHHHHGGSGMFKKYSSLENHYNSKFIEKLYTNGLTTGVWVAREKIHGTNFSLIITRDNVTCAKRTGPILPAEDFYGYEIVLKKYDKAIKTVQKFMYTARAVSYQVFGEFAGGGIQKGVDYGEKDFYVFDILINTESGDNTYLTDYEMQDFCNEFGFKMAPMLGRGTFDELIMIPNDLDSVLPAYNATASEDLVEANNCVWDANVIGDNTAEGYVLKPCFPKWLPNGTRVAIKCKNSKFSEKKKSDKPIKTQVPLTEIDKNLLDVLACYVTLNRVNNVISKIGTVTPKDFGKVMGLTVQDILEETSREGIVLTTSDNPNLVKKELQRMVQDVLRPAWIELVS

SEQ ID NO: 139 - DNA, 1029 bp, synthetic construct
  misc_feature 1..1029: note = variant of RNA ligase 2 from Escherichia phage RB69 (Bacteriophage RB69)
  source 1..1029: mol_type = other DNA
atgcatcaccatcaccatcacggtggcagcggtatgtttaagaaatattctagtctggaaaaccattacaatagcaaattcattgagaaactctataccaacggcttaactactggtgtgtgggttgcgcgcgaaaagatccacgggacgaacttttcgctgattatcacccgtgataatgtaacatgcgccaaacgtacaggcccgattctgcctgcagaagacttctacggttatgaaatcgtcctgaagaaatacgataaagcgattaaggctgtgcagaaatttatgtataccgcccgcgcggtttcctaccaagtgttcggagaatttgctggcgggggtatccagaaaggtgtcgattatggcgagaaagacttctatgtgtttgatattctgatcaatacggaatcaggagacaacacgtacctgactgattatgaaatgcaggacttctgtaatgaatttgggtttaagatggcaccaatgcttggtcgcggcacattcgattcgctgattatgattccgaacgattttgattcggttctcgcagcttacaatgcaacggcgagcgaggacctggtagaagcgaacaactgcgtctgggatgccaatgtgatcggtgacaacactgctgaaggctatgttcttaaaccgtgtttccccaaatggttaccgaatgggacgcgtgtggcgatcaaatgcaagaactccaaattcagcgagaagaagaaaagtgacaaaccgatcaagacacaagtcccactgacggaaattgataagaatctgctggacgtattggcctgttacgtcactttaaaccgcgtgaacaacgtgatctctaagattggaacagtgacgccgaaagattttggcaaagtaatgggtctgactgttcaggatattctggaagaaacgtcacgtgagggtattgttctgacgacatcggacaatcctaatctcgtcaagaaagaacttcagcgcatggtgcaggatgtattacgtcccgcatggatcgaactggtgtcg

SEQ ID NO: 140 - protein, 343 aa, synthetic construct
  REGION 1..343: note = variant of RNA ligase 2 from Escherichia phage RB69 (Bacteriophage RB69)
MHHHHHHGGSGMFKKYSSLENHYNSKFIEKLYTNGLTTGVWVAREKIHGTNFSLIITRDNVTCAKRTGPILPAEDFYGYEIVLKKYDKAIKAVQKFMYTARAVSYQVFGEFAGGGIQKGVDYGEKDFYVFDILINTESGDNTYLTDYEMQDFCNEFGFKMAPMLGRGTFDSLIMIPNDFDSVLAAYNATASEDLVEANNCVWDANVIGDNTAEGYVLKPCFPKWLPNGTRVAIKCKNSKFSEKKKSDKPIKTQVPLTEIDKNLLDVLACYVTLNRVNNVISKIGTVTPKDFGKVMGLTVQDILEETSREGIVLTTSDNPNLVKKELQRMVQDVLRPAWIELVS

SEQ ID NO: 141 - DNA, 1029 bp, synthetic construct
  misc_feature 1..1029: note = variant of RNA ligase 2 from Escherichia phage RB69 (Bacteriophage RB69)
  source 1..1029: mol_type = other DNA
atgcatcaccatcaccatcacggtggcagcggtatgtttaagaaatattctagtctggaaaaccattacaatagcaaattcattgagaaactctataaaaacggcttaactactggtgtgtgggttgcgcgcgaaaagatccacgggacgaacttttcgctgattatcgagcgtgataatgtaacatgcgccaaacgtacaggcccgattttgcctgcagaagacttctacggttatgaaatcgtcctgaagaaatacgataaagcgattaagacggtgcagaaatttatgtataccgccggcgcggtttcctaccaagtgttcggagaatttgctggcggcggtatccagaaaggtgtcgattatggcgagaaagacttctatgtgtttgatattctgatcaatacggaatcaggagacaacacgtacctgactgattatgaaatgcaggacttctgtaatgaatttgggtttaagatggcaccaatgcttggtcgcggcacattcgatagcctgattatgattccgaacgatttcgattcggttctcgccgcttacaatgcaacggcgagcgaggacctggtagaagcgaacaactgcgtctttgatgccaatgtgactggtgataacactgctgaaggctatgttcttaaaccgtgtgaacccaaatggttaccgaatgggacgcgtgtggcgatcaaatgcaagaactccaaattcagcgagaagaagaaaagtgacaaaccgatcaagacacaagtcccactgacggaaattgataagaatctgctggacgtattggcctgttacgtcactttaaaccgcgtgaacaacgtgatctctaagattggaacagtgacgccgaaagattttggcaaagtaatgggtctgactgttaaggatattctggaagaaacgtcacgtgagggtattgttctgacgacatcggacaatcctaatctcgtcaagaaagaacttgttcgcatggtgcaggatgtattagaatcggcatggcgcgaactggtgtcg

SEQ ID NO: 142 - protein, 343 aa, synthetic construct
  REGION 1..343: note = variant of RNA ligase 2 from Escherichia phage RB69 (Bacteriophage RB69)
MHHHHHHGGSGMFKKYSSLENHYNSKFIEKLYKNGLTTGVWVAREKIHGTNFSLIIERDNVTCAKRTGPILPAEDFYGYEIVLKKYDKAIKTVQKFMYTAGAVSYQVFGEFAGGGIQKGVDYGEKDFYVFDILINTESGDNTYLTDYEMQDFCNEFGFKMAPMLGRGTFDSLIMIPNDFDSVLAAYNATASEDLVEANNCVFDANVTGDNTAEGYVLKPCEPKWLPNGTRVAIKCKNSKFSEKKKSDKPIKTQVPLTEIDKNLLDVLACYVTLNRVNNVISKIGTVTPKDFGKVMGLTVKDILEETSREGIVLTTSDNPNLVKKELVRMVQDVLESAWRELVS

SEQ ID NO: 143 - DNA, 1029 bp, synthetic construct
  misc_feature 1..1029: note = variant of RNA ligase 2 from Escherichia phage RB69 (Bacteriophage RB69)
  source 1..1029: mol_type = other DNA
atgcatcaccatcaccatcacggtggcagcggtatgtttaagaaatattctagtctggaaaaccattacaatagcaaattcattgagaaactctataaaaacggcttaactactggtgtgtgggttgcgcgcgaaaagatccacgggacgaacttttcgctgattatcgagcgtgataatgtaacatgcgccaaacgtacaggcccgattttgcctgcagaagacttctacggttatgaaatcgtcctgaagaaatacgataaagcgattaagacggtgcagaaatttatgtataccgcccgcgcggtttcctaccaagtgttcggagaatttgctggcggcggtatccagaaaggtgtcgattatggcgagaaagacttctatgtgtttgatattctgatcaatacggaatcaggagacaacacgtacctgactgattatgaaatgcaggacttctgtaatgaatttgggtttaagatggcaccaatgcttggtcgcggcacattcgatagcctgattatgattccgaacgatttcgattcggttctcgctgcttacaatgcaacggcgagcgaggacctggtagaagcgaacaactgcgtctttgatgccaatgtgatcggtgataatactgctgaaggctatgttcttaaaccgtgtgaacccaaatggttaccgaatgggacgcgtgtggcgatcaaatgcaagaactccaaattcagcgagaagaagaaaagtgacaaaccgatcaagacacaagtcccactgacggaaattgataagaatctgctggacgtattggcctgttacgtcactttaaaccgcgtgaacaacgtgatctctaagattggaacagtgacgccgaaagattttggcaaagtaatgggtctgactgttcaggatattctggaagaaacgtcacgtgagggtattgttctgacgacatcggacaatcctaatctcgtcaagaaagaacttgttcgcatggtgcaggatgtattacgctcggcatggatcgaactggtgtcg

SEQ ID NO: 144 - protein, 343 aa, synthetic construct
  REGION 1..343: note = variant of RNA ligase 2 from Escherichia phage RB69 (Bacteriophage RB69)
MHHHHHHGGSGMFKKYSSLENHYNSKFIEKLYKNGLTTGVWVAREKIHGTNFSLIIERDNVTCAKRTGPILPAEDFYGYEIVLKKYDKAIKTVQKFMYTARAVSYQVFGEFAGGGIQKGVDYGEKDFYVFDILINTESGDNTYLTDYEMQDFCNEFGFKMAPMLGRGTFDSLIMIPNDFDSVLAAYNATASEDLVEANNCVFDANVIGDNTAEGYVLKPCEPKWLPNGTRVAIKCKNSKFSEKKKSDKPIKTQVPLTEIDKNLLDVLACYVTLNRVNNVISKIGTVTPKDFGKVMGLTVQDILEETSREGIVLTTSDNPNLVKKELVRMVQDVLRSAWIELVS

SEQ ID NO: 145 - DNA, 1029 bp, synthetic construct
  misc_feature 1..1029: note = variant of RNA ligase 2 from Escherichia phage RB69 (Bacteriophage RB69)
  source 1..1029: mol_type = other DNA
atgcatcaccatcaccatcacggtggcagcggtatgtttaagaaatattctagtctggaaaaccattacaatagcaaattcattgagaaactctataccaacggcttaactactggtgtgtgggttgcgcgcgaaaagatccacgggacgaacttttcgctgattatcgagcgtgataatgtaacatgcgccaaacgtacaggcccgattttgcctgcagaagacttctacggttatgaaatcgtcctgaagaaatacgataaagcgattaagacggtgcagaaatttatgtataccgcccgcgcggtttcctaccaagtgttcggagaatttgctggcggcggtatccagaaaggtgtcgattatggcgagaaagacttctatgtgtttgatattctgatcaatacggaatcaggagacaacacgtacctgactgattatgaaatgcaggacttctgtaatgaatttgggtttaagatggcaccaatgcttggtcgcggcacattcgatagcctgattatgattccgaacgatttcgattcggttctcgccgcttacaatgcaacggcgagcgaggacctggtaaaagcgaacaactgcgtctttgatgccaatgtgattggtgataacactgctgaaggctatgttcttaaaccgtgtgaacccaaatggttaccgaatgggacgcgtgtggcgatcaaatgcaagaactccaaattcagcgagaagaagaaaagtgacaaaccgatcaagacacaagtcccactgacggaaattgataagaatctgctggacgtattggcctgttacgtcactttaaaccgcgtgaacaacgtgatctctaagattggaacagtgacgccgaaagattttggcaaagtaatgggtctgactgttaaggatattctggaagaaacgtcacgtgagggtattgttctgacgacatcggacaatcctaatctcgtcaagaaagaacttgttcgcatggtgcaggatgtattagaatcggcatggcgcgaactggtgtcg

SEQ ID NO: 146 - protein, 343 aa, synthetic construct
  REGION 1..343: note = variant of RNA ligase 2 from Escherichia phage RB69 (Bacteriophage RB69)
MHHHHHHGGSGMFKKYSSLENHYNSKFIEKLYTNGLTTGVWVAREKIHGTNFSLIIERDNVTCAKRTGPILPAEDFYGYEIVLKKYDKAIKTVQKFMYTARAVSYQVFGEFAGGGIQKGVDYGEKDFYVFDILINTESGDNTYLTDYEMQDFCNEFGFKMAPMLGRGTFDSLIMIPNDFDSVLAAYNATASEDLVKANNCVFDANVIGDNTAEGYVLKPCEPKWLPNGTRVAIKCKNSKFSEKKKSDKPIKTQVPLTEIDKNLLDVLACYVTLNRVNNVISKIGTVTPKDFGKVMGLTVKDILEETSREGIVLTTSDNPNLVKKELVRMVQDVLESAWRELVS

SEQ ID NO: 147 - DNA, 1029 bp, synthetic construct
  misc_feature 1..1029: note = variant of RNA ligase 2 from Escherichia phage RB69 (Bacteriophage RB69)
  source 1..1029: mol_type = other DNA
atgcatcaccatcaccatcacggtggcagcggtatgtttaagaaatattctagtctggaaaaccattacaatagcaaattcattgagaaactctataaaaacggcttaactactggtgtgtgggttgcgcgcgaaaagatccacgggacgaacttttcgctgattatcgagcgtgataatgtaacatgcgccaaacgtacaggcccgattttgcctgcagaagacttctacggttatgaaatcgtcctgaagaaatacgataaagcgattaagacggtgcagaaatttatgtataccgcccgcgcggtttcctaccaagtgttcggagaatttgctggcggcggtatccagaaaggtgtcgattatggcgagaaagacttctatgtgtttgatattctgatcaatacggaatcaggagacaacacgtacctgactgattatgaaatgcaggacttctgtaatgaatttgggtttaagatggcaccaatgcttggtcgcggcacattcgatagcctgattatgattccgaacgatttcgattcggttctccctgcttacaatgcaacggcgagcgaggacctggtagaagcgaacaactgcgtctttgatgccaatgtgatcggtgataacactgctgaaggctatgttcttaaaccgtgtgaacccaaatggttaccgaatgggacgcgtgtggcgatcaaatgcaagaactccaaattcagcgagaagaagaaaagtgacaaaccgatcaagacacaagtcccactgacggaaattgataagaatctgctggacgtattggcctgttacgtcactttaaaccgcgtgaacaacgtgatctctaagattggaacagtgacgccgaaagattttggcaaagtaatgggtctgactgttcaggatattctggaagaaacgtcacgtgagggtattgttctgacgacatcggacaatcctaacctcgtcaagaaagaacttgttcgcatggtgcaggatgtattacgctcggcatggcgcgaactggtgtcg

SEQ ID NO: 148 - protein, 343 aa, synthetic construct
  REGION 1..343: note = variant of RNA ligase 2 from Escherichia phage RB69 (Bacteriophage RB69)
MHHHHHHGGSGMFKKYSSLENHYNSKFIEKLYKNGLTTGVWVAREKIHGTNFSLIIERDNVTCAKRTGPILPAEDFYGYEIVLKKYDKAIKTVQKFMYTARAVSYQVFGEFAGGGIQKGVDYGEKDFYVFDILINTESGDNTYLTDYEMQDFCNEFGFKMAPMLGRGTFDSLIMIPNDFDSVLPAYNATASEDLVEANNCVFDANVIGDNTAEGYVLKPCEPKWLPNGTRVAIKCKNSKFSEKKKSDKPIKTQVPLTEIDKNLLDVLACYVTLNRVNNVISKIGTVTPKDFGKVMGLTVQDILEETSREGIVLTTSDNPNLVKKELVRMVQDVLRSAWRELVS

SEQ ID NO: 149 - DNA, 1029 bp, synthetic construct
  misc_feature 1..1029: note = variant of RNA ligase 2 from Escherichia phage RB69 (Bacteriophage RB69)
  source 1..1029: mol_type = other DNA
atgcatcaccatcaccatcacggtggcagcggtatgtttaagaaatattctagtctggaaaaccattacaatagcaaattcattgagaaactctatgctaacggcttaactactggtgtgtgggttgcgcgcgaaaagatccacgggacgaacttttcgctgattatcgagcgtgataatgtaacatgcgccaaacgtacaggcccgattttgcctgcagaagacttctacggttatgaaatcgtcctgaagaaatacgataaagcgattaagacggtgcagaaatttatgtataccgcccgcgcggtttcctaccaagtgttcggagaatttgctggcggcggtatccagaaaggtgtcgattatggcgagaaagacttctatgtgtttgatattctgatcaatacggaatcaggagacaacacgtacctgactgattatgaaatgcaggacttctgtaatgaatttgggtttaagatggcaccaatgcttggtcgcggcacattcgatagcctgattatgattccgaacgatttcgattcggttctccctgcttacaatgcaacggcgagcgaggacctggtaaaagcgaacaactgcgtctttgatgccaatgtgatcggtgataacactgctgaaggctatgttcttaaaccgtgtgaacccaaatggttaccgaatgggacgcgtgtggcgatcaaatgcaagaactccaaattcagcgagaagaagaaaagtgacaaaccgatcaagacacaagtcccactgacggaaattgataagaatctgctggacgtattggcctgttacgtcactttaaaccgcgtgaacaacgtgatctctaagattggaacagtgacgccgaaagattttggcaaagtaatgggtctgactgttaaggatattctggaagaaacgtcacgtgagggtattgttctgacgacatcggacaatcctaacctcgtcaagaaagaacttgttcgcatggtgcaggatgtattacgtcccgcatggatcgaactggtgtcg

SEQ ID NO: 150 - protein, 343 aa, synthetic construct
  REGION 1..343: note = variant of RNA ligase 2 from Escherichia phage RB69 (Bacteriophage RB69)
MHHHHHHGGSGMFKKYSSLENHYNSKFIEKLYANGLTTGVWVAREKIHGTNFSLIIERDNVTCAKRTGPILPAEDFYGYEIVLKKYDKAIKTVQKFMYTARAVSYQVFGEFAGGGIQKGVDYGEKDFYVFDILINTESGDNTYLTDYEMQDFCNEFGFKMAPMLGRGTFDSLIMIPNDFDSVLPAYNATASEDLVKANNCVFDANVIGDNTAEGYVLKPCEPKWLPNGTRVAIKCKNSKFSEKKKSDKPIKTQVPLTEIDKNLLDVLACYVTLNRVNNVISKIGTVTPKDFGKVMGLTVKDILEETSREGIVLTTSDNPNLVKKELVRMVQDVLRPAWIELVS

SEQ ID NO: 151 - DNA, 1029 bp, synthetic construct
  misc_feature 1..1029: note = variant of RNA ligase 2 from Escherichia phage RB69 (Bacteriophage RB69)
  source 1..1029: mol_type = other DNA
atgcatcaccatcaccatcacggtggcagcggtatgtttaagaaatattctagtctggaaaaccattacaatagcaaattcattgagaaactctataccaacggcttaactactggtgtgtgggttgcgcgcgaaaagatccacgggacgaacttttcgctgattatcgagcgtgataatgtaacatgcgccaaacgtacaggcccgattttgcctgcagaagacttctacggttatgaaatcgtcctgaagaaatacgataaagcgattaagacggtgcagaaatttatgtataccgccggcgcggtttcctaccaagtgttcggagaatttgctggcggcggtatccagaaaggtgtcgattatggcgagaaagacttctatgtgtttgatattctgatcaatacggaatcaggagacaacacgtacctgactgattatgaaatgcaggacttctgtaatgaatttgggtttaagatggcaccaatgcttggtcgcggcacattcgatagcctgattatgattccgaacgatttcgattcggttctcgctgcttacaatgcaacggcgagcgaggacctggtaaaagcgaacaactgcgtctttgatgccaatgtgactggtctgaacactgctgaaggctatgttcttaaaccgtgtgaacccaaatggttaccgaatgggacgcgtgtggcgatcaaatgcaagaactccaaattcagcgagaagaagaaaagtgacaaaccgatcaagacacaagtcccactgacggaaattgataagaatctgctggacgtattggcctgttacgtcactttaaaccgcgtgaacaacgtgatctctaagattggaacagtgacgccgaaagattttggcaaagtaatgggtctgactgttaaggatattctggaagaaacgtcacgtgagggtattgttctgacgacatcggacaatcctaatctcgtcaagaaagaacttgttcgcatggtgcaggatgtattacgctcggcatggcgcgaactggtgtcg

SEQ ID NO: 152 - protein, 343 aa, synthetic construct
  REGION 1..343: note = variant of RNA ligase 2 from Escherichia phage RB69 (Bacteriophage RB69)
MHHHHHHGGSGMFKKYSSLENHYNSKFIEKLYTNGLTTGVWVAREKIHGTNFSLIIERDNVTCAKRTGPILPAEDFYGYEIVLKKYDKAIKTVQKFMYTAGAVSYQVFGEFAGGGIQKGVDYGEKDFYVFDILINTESGDNTYLTDYEMQDFCNEFGFKMAPMLGRGTFDSLIMIPNDFDSVLAAYNATASEDLVKANNCVFDANVTGLNTAEGYVLKPCEPKWLPNGTRVAIKCKNSKFSEKKKSDKPIKTQVPLTEIDKNLLDVLACYVTLNRVNNVISKIGTVTPKDFGKVMGLTVKDILEETSREGIVLTTSDNPNLVKKELVRMVQDVLRSAWRELVS

SEQ ID NO: 153 - DNA, 1029 bp, synthetic construct
  misc_feature 1..1029: note = variant of RNA ligase 2 from Escherichia phage RB69 (Bacteriophage RB69)
  source 1..1029: mol_type = other DNA
atgcatcaccatcaccatcacggtggcagcggtatgtttaagaaatattctagtctggaaaaccattacaatagcaaattcattgagaaactctataccaacggcttaactactggtgtgtgggttgcgcgcgaaaagatccacgggacgaacttttcgctgattatcgagcgtgataatgtaacatgcgccaaacgtacaggcccgattttgcctgcagaagacttctacggttatgaaatcgtcctgaagaaatacgataaagcgattaagacggtgcagaaatttatgtataccgccggcgcggtttcctaccaagtgttcggagaatttgctggcggcggtatccagaaaggtgtcgattatggcgagaaagacttctatgtgtttgatattctgatcaatacggaatcaggagacaacacgtacctgactgattatgaaatgcaggacttctgtaatgaatttgggtttaagatggcaccaatgcttggtcgcggcacattcgatagcctgattatgattccgaacgatttcgattcggttctccgcgcttacaatgcaacggcgagcgaggacctggtagaagcgaacaactgcgtctttgatgccaatgtgatcggtgataacactgctgaaggctatgttcttaaaccgtgtttccccaaatggttaccgaatgggacgcgtgtggcgatcaaatgcaagaactccaaattcagcgagaagaagaaaagtgacaaaccgatcaagacacaagtcccactgacggaaattgataagaatctgctggacgtattggcctgttacgtcactttaaaccgcgtgaacaacgtgatctctaagattggaacagtgacgccgaaagattttggcaaagtaatgggtctgactgttcaggatattctggaagaaacgtcacgtgagggtattgttctgacgacatcggacaatcctaatctcgtcaagaaagaacttgttcgcatggtgcaggatgtattagaatcggcatggcgcgaactggtgtcg

SEQ ID NO: 154 - protein, 343 aa, synthetic construct
  REGION 1..343: note = variant of RNA ligase 2 from Escherichia phage RB69 (Bacteriophage RB69)
MHHHHHHGGSGMFKKYSSLENHYNSKFIEKLYTNGLTTGVWVAREKIHGTNFSLIIERDNVTCAKRTGPILPAEDFYGYEIVLKKYDKAIKTVQKFMYTAGAVSYQVFGEFAGGGIQKGVDYGEKDFYVFDILINTESGDNTYLTDYEMQDFCNEFGFKMAPMLGRGTFDSLIMIPNDFDSVLRAYNATASEDLVEANNCVFDANVIGDNTAEGYVLKPCFPKWLPNGTRVAIKCKNSKFSEKKKSDKPIKTQVPLTEIDKNLLDVLACYVTLNRVNNVISKIGTVTPKDFGKVMGLTVQDILEETSREGIVLTTSDNPNLVKKELVRMVQDVLESAWRELVS

SEQ ID NO: 155 - DNA, 1029 bp, synthetic construct
  misc_feature 1..1029: note = variant of RNA ligase 2 from Escherichia phage RB69 (Bacteriophage RB69)
  source 1..1029: mol_type = other DNA
atgcatcaccatcaccatcacggtggcagcggtatgtttaagaaatattctagtctggaaaaccattacaatagcaaattcattgagaaactctatgctaacggcttaactactggtgtgtgggttgcgcgcgaaaagatccacgggacgaacttttcgctgattatcgagcgtgataatgtaacatgcgccaaacgtacaggcccgattttgcctgcagaagacttctacggttatgaaatcgtcctgaagaaatacgataaagcgattaagacggtgcagaaatttatgtataccgcccgcgcggtttcctaccaagtgttcggagaatttgctggcggcggtatccagaaaggtgtcgattatggcgagaaagacttctatgtgtttgatattctgatcaatacggaatcaggagacaacacgtacctgactgattatgaaatgcaggacttctgtaatgaatttgggtttaagatggcaccaatgcttggtcgcggcacattcgatagcctgattatgattccgaacgatttcgattcggttctcctggcttacaatgcaacggcgagcgaggacctggtaaaagcgaacaactgcgtctttgatgccaatgtgattggtgataacactgctgaaggctatgttcttaaaccgtgtttccccaaatggttaccgaatgggacgcgtgtggcgatcaaatgcaagaactccaaattcagcgagaagaagaaaagtgacaaaccgatcaagacacaagtcccactgacggaaattgataagaatctgctggacgtattggcctgttacgtcactttaaaccgcgtgaacaacgtgatctctaagattggaacagtgacgccgaaagattttggcaaagtaatgggtctgactgttcaggatattctggaagaaacgtcacgtgagggtattgttctgacgacatcggacaatcctgacctcgtcaagaaagaacttgttcgcatggtgcaggatgtattacgctcggcatggcgcgaactggtgtcg

SEQ ID NO: 156 - protein, 343 aa, synthetic construct
  REGION 1..343: note = variant of RNA ligase 2 from Escherichia phage RB69 (Bacteriophage RB69)
MHHHHHHGGSGMFKKYSSLENHYNSKFIEKLYANGLTTGVWVAREKIHGTNFSLIIERDNVTCAKRTGPILPAEDFYGYEIVLKKYDKAIKTVQKFMYTARAVSYQVFGEFAGGGIQKGVDYGEKDFYVFDILINTESGDNTYLTDYEMQDFCNEFGFKMAPMLGRGTFDSLIMIPNDFDSVLLAYNATASEDLVKANNCVFDANVIGDNTAEGYVLKPCFPKWLPNGTRVAIKCKNSKFSEKKKSDKPIKTQVPLTEIDKNLLDVLACYVTLNRVNNVISKIGTVTPKDFGKVMGLTVQDILEETSREGIVLTTSDNPDLVKKELVRMVQDVLRSAWRELVS

SEQ ID NO: 157 - DNA, 1029 bp, synthetic construct
  misc_feature 1..1029: note = variant of RNA ligase 2 from Escherichia phage RB69 (Bacteriophage RB69)
  source 1..1029: mol_type = other DNA
atgcatcaccatcaccatcacggtggcagcggtatgtttaagaaatattctagtctggaaaaccattacaatagcaaattcattgagaaactctatgctaacggcttaactactggtgtgtgggttgcgcgcgaaaagatccacgggacgaacttttcgctgattatcgagcgtgataatgtaacatgcgccaaacgtacaggcccgattttgcctgcagaagacttctacggttatgaaatcgtcctgaagaaatacgataaagcgattaagacggtgcagaaatttatgtataccgcccgcgcggtttcctaccaagtgttcggagaatttgctggcggcggtatccagaaaggtgtcgattatggcgagaaagacttctatgtgtttgatattctgatcaatacggaatcaggagacaacacgtacctgactgattatgaaatgcaggacttctgtaatgaatttgggtttaagatggcaccaatgcttggtcgcggcacattcgatagcctgattatgattccgaacgatttcgattcggttctccctgcttacaatgcaacggcgagcgaggacctggtaaaagcgaacaactgcgtctttgatgccaatgtgatcggtgataacactgctgaaggctatgttcttaaaccgtgtttccccaaatggttaccgaatgggacgcgtgtggcgatcaaatgcaagaactccaaattcagcgagaagaagaaaagtgacaaaccgatcaagacacaagtcccactgacggaaattgataagaatctgctggacgtattggcctgttacgtcactttaaaccgcgtgaacaacgtgatctctaagattggaacagtgacgccgaaagattttggcaaagtaatgggtctgactgttaaggatattctggaagaaacgtcacgtgagggtattgttctgacgacatcggacaatcctgacctcgtcaagaaagaacttgttcgcatggtgcaggatgtattacactcggcatggcgcgaactggtgtcg

SEQ ID NO: 158 - protein, 343 aa, synthetic construct
  REGION 1..343: note = variant of RNA ligase 2 from Escherichia phage RB69 (Bacteriophage RB69)
MHHHHHHGGSGMFKKYSSLENHYNSKFIEKLYANGLTTGVWVAREKIHGTNFSLIIERDNVTCAKRTGPILPAEDFYGYEIVLKKYDKAIKTVQKFMYTARAVSYQVFGEFAGGGIQKGVDYGEKDFYVFDILINTESGDNTYLTDYEMQDFCNEFGFKMAPMLGRGTFDSLIMIPNDFDSVLPAYNATASEDLVKANNCVFDANVIGDNTAEGYVLKPCFPKWLPNGTRVAIKCKNSKFSEKKKSDKPIKTQVPLTEIDKNLLDVLACYVTLNRVNNVISKIGTVTPKDFGKVMGLTVKDILEETSREGIVLTTSDNPDLVKKELVRMVQDVLHSAWRELVS

SEQ ID NO: 159 - DNA, 1029 bp, synthetic construct
  misc_feature 1..1029: note = variant of RNA ligase 2 from Escherichia phage RB69 (Bacteriophage RB69)
  source 1..1029: mol_type = other DNA
atgcatcaccatcaccatcacggtggcagcggtatgtttaagaaatattctagtctggaaaaccattacaatagcaaattcattgagaaactctataccaacggcttaactactggtgtgtgggttgcgcgcgaaaagatccacgggacgaacttttcgctgattatcgagcgtgataatgtaacatgcgccaaacgtacaggcccgattttgcctgcagaagacttctacggttatgaaatcgtcctgaagaaatacgataaagcgattaagacggtgcagaaatttatgtataccgcccgcgcggtttcctaccaagtgttcggagaatttgctggcggcggtatccagaaaggtgtcgattatggcgagaaagacttctatgtgtttgatattctgatcaatacggaatcaggagacaacacgtacctgactgattatgaaatgcaggacttctgtaatgaatttgggtttaagatggcaccaatgcttggtcgcggcacattcgatagcctgattatgattccgaacgatttcgattcggttctcctggcttacaatgcaacggcgagcgaggacctggtagaagcgaacaactgcgtctttgatgccaatgtgattggtgataacactgctgaaggctatgttcttaaaccgtgtttccccaaatggttaccgaatgggacgcgtgtggcgatcaaatgcaagaactccaaattcagcgagaagaagaaaagtgacaaaccgatcaagacacaagtcccactgacggaaattgataagaatctgctggacgtattggcctgttacgtcactttaaaccgcgtgaacaacgtgatctctaagattggaacagtgacgccgaaagattttggcaaagtaatgggtctgactgttcaggatattctggaagaaacgtcacgtgagggtattgttctgacgacatcggacaatcctgacctcgtcaagaaagaacttgttcgcatggtgcaggatgtattagaatcggcatggcgcgaactggtgtcg

SEQ ID NO: 160 - protein, 343 aa, synthetic construct
  REGION 1..343: note = variant of RNA ligase 2 from Escherichia phage RB69 (Bacteriophage RB69)
MHHHHHHGGSGMFKKYSSLENHYNSKFIEKLYTNGLTTGVWVAREKIHGTNFSLIIERDNVTCAKRTGPILPAEDFYGYEIVLKKYDKAIKTVQKFMYTARAVSYQVFGEFAGGGIQKGVDYGEKDFYVFDILINTESGDNTYLTDYEMQDFCNEFGFKMAPMLGRGTFDSLIMIPNDFDSVLLAYNATASEDLVEANNCVFDANVIGDNTAEGYVLKPCFPKWLPNGTRVAIKCKNSKFSEKKKSDKPIKTQVPLTEIDKNLLDVLACYVTLNRVNNVISKIGTVTPKDFGKVMGLTVQDILEETSREGIVLTTSDNPDLVKKELVRMVQDVLESAWRELVS

SEQ ID NO: 161 - DNA, 1029 bp, synthetic construct
  misc_feature 1..1029: note = variant of RNA ligase 2 from Escherichia phage RB69 (Bacteriophage RB69)
  source 1..1029: mol_type = other DNA
atgcatcaccatcaccatcacggtggcagcggtatgtttaagaaatattctagtctggaaaaccattacaatagcaaattcattgagaaactctatactaacggcttaactactggtgtgtgggttgcgcgcgaaaagatccacgggacgaacttttcgctgattatcgagcgtgataatgtaacatgcgccaaacgtacaggcccgattttgcctgcagaagacttctacggttatgaaatcgtcctgaagaaatacgataaagcgattaagacggtgcagaaatttatgtataccgcccgcgcggtttcctaccaagtgttcggagaatttgctggcggcggtatccagaaaggtgtcgattatggcgagaaagacttctatgtgtttgatattctgatcaatacggaatcaggagacaacacgtacctgactgattatgaaatgcaggacttctgtaatgaatttgggtttaagatggcaccaatgcttggtcgcggcacattcgatagcctgattatgattccgaacgatttcgattcggttctcctggcttacaatgcaacggcgagcgaggacctggtaaaagcgaacaactgcgtctttgatgccaatgtgactggtctgaacactgctgaaggctatgttcttaaaccgtgtttccccaaatggttaccgaatgggacgcgtgtggcgatcaaatgcaagaactccaaattcagcgagaagaagaaaagtgacaaaccgatcaagacacaagtcccactgacggaaattgataagaatctgctggacgtattggcctgttacgtcactttaaaccgcgtgaacaacgtgatctctaagattggaacagtgacgccgaaagattttggcaaagtaatgggtctgactgttaaggatattctggaagaaacgtcacgtgagggtattgttctgacgacatcggacaatcctaacctcgtcaagaaagaacttgttcgcatggtgcaggatgtattagaatcggcatggcgcgaactggtgtcg

SEQ ID NO: 162 - protein, 343 aa, synthetic construct
  REGION 1..343: note = variant of RNA ligase 2 from Escherichia phage RB69 (Bacteriophage RB69)
MHHHHHHGGSGMFKKYSSLENHYNSKFIEKLYTNGLTTGVWVAREKIHGTNFSLIIERDNVTCAKRTGPILPAEDFYGYEIVLKKYDKAIKTVQKFMYTARAVSYQVFGEFAGGGIQKGVDYGEKDFYVFDILINTESGDNTYLTDYEMQDFCNEFGFKMAPMLGRGTFDSLIMIPNDFDSVLLAYNATASEDLVKANNCVFDANVTGLNTAEGYVLKPCFPKWLPNGTRVAIKCKNSKFSEKKKSDKPIKTQVPLTEIDKNLLDVLACYVTLNRVNNVISKIGTVTPKDFGKVMGLTVKDILEETSREGIVLTTSDNPNLVKKELVRMVQDVLESAWRELVS

SEQ ID NO: 163 - DNA, 1029 bp, synthetic construct
  misc_feature 1..1029: note = variant of RNA ligase 2 from Escherichia phage RB69 (Bacteriophage RB69)
  source 1..1029: mol_type = other DNA
atgcatcaccatcaccatcacggtggcagcggtatgtttaagaaatattctagtctggaaaaccattacaatagcaaattcattgagaaactctatactaacggcttaactactggtgtgtgggttgcgcgcgaaaagatccacgggacgaacttttcgctgattatcgagcgtgataatgtaacatgcgccaaacgtacaggcccgattttgcctgcagaagacttctacggttatgaaatcgtcctgaagaaatacgataaagcgattaagacggtgcagaaatttatgtataccgcccgcgcggtttcctaccaagtgttcggagaatttgctggcggcggtatccagaaaggtgtcgattatggcgagaaagacttctatgtgtttgatattctgatcaatacggaatcaggagacaacacgtacctgactgattatgaaatgcaggacttctgtaatgaatttgggtttaagatggcaccaatgcttggtcgcggcacattcgatagcctgattatgattccgaacgatttcgattcggttctccgcgcttacaatgcaacggcgagcgaggacctggtaaaagcgaacaactgcgtctttgatgccaatgtgatcggtgataacactgctgaaggctatgttcttaaaccgtgttttcccaaatggttaccgaatgggacgcgtgtggcgatcaaatgcaagaactccaaattcagcgagaagaagaaaagtgacaaaccgatcaagacacaagtcccactgacggaaattgataagaatctgctggacgtattggcctgttacgtcactttaaaccgcgtgaacaacgtgatctctaagattggaacagtgacgccgaaagattttggcaaagtaatgggtctgactgttcaggatattctggaagaaacgtcacgtgagggtattgttctgacgacatcggacaatcctgacctcgtcaagaaagaacttgttcgcatggtgcaggatgtattagaatcggcatggcgcgaactggtgtcg

SEQ ID NO: 164 - protein, 343 aa, synthetic construct
  REGION 1..343: note = variant of RNA ligase 2 from Escherichia phage RB69 (Bacteriophage RB69)
MHHHHHHGGSGMFKKYSSLENHYNSKFIEKLYTNGLTTGVWVAREKIHGTNFSLIIERDNVTCAKRTGPILPAEDFYGYEIVLKKYDKAIKTVQKFMYTARAVSYQVFGEFAGGGIQKGVDYGEKDFYVFDILINTESGDNTYLTDYEMQDFCNEFGFKMAPMLGRGTFDSLIMIPNDFDSVLRAYNATASEDLVKANNCVFDANVIGDNTAEGYVLKPCFPKWLPNGTRVAIKCKNSKFSEKKKSDKPIKTQVPLTEIDKNLLDVLACYVTLNRVNNVISKIGTVTPKDFGKVMGLTVQDILEETSREGIVLTTSDNPDLVKKELVRMVQDVLESAWRELVS

SEQ ID NO: 165 - DNA, 1029 bp, synthetic construct
  misc_feature 1..1029: note = variant of RNA ligase 2 from Escherichia phage RB69 (Bacteriophage RB69)
  source 1..1029: mol_type = other DNA
atgcatcaccatcaccatcacggtggcagcggtatgtttaagaaatattctagtctggaaaaccattacaatagcaaattcattgagaaactctataaaaacggcttaactactggtgtgtgggttgcgcgcgaaaagatccacgggacgaacttttcgctgattatcgagcgtgataatgtaacatgcgccaaacgtacaggcccgattttgcctgcagaagacttctacggttatgaaatcgtcctgaagaaatacgataaagcgattaagacggtgcagaaatttatgtataccgcccgcgcggtttcctaccaagtgttcggagaatttgctggcggcggtatccagaaaggtgtcgattatggcgagaaagacttctatgtgtttgatattctgatcaatacggaatcaggagacaacacgtacctgactgattatgaaatgcaggacttctgtaatgaatttgggtttaagatggcaccaatgcttggtcgcggcacattcgatagcctgattatgattccgaacgatttcgattcggttctcgccgcttacaatgcaacggcgagcgaggacctggtaaaagcgaacaactgcgtctttgatgccaatgtgattggtctgaacactgctgaaggctatgttcttaaaccgtgtgaacccaaatggttaccgaatgggacgcgtgtggcgatcaaatgcaagaactccaaattcagcgagaagaagaaaagtgacaaaccgatcaagacacaagtcccactgacggaaattgataagaatctgctggacgtattggcctgttacgtcactttaaaccgcgtgaacaacgtgatctctaagattggaacagtgacgccgaaagattttggcaaagtaatgggtctgactgttcaggatattctggaagaaacgtcacgtgagggtattgttctgacgacatcggacaatcctaacctcgtcaagaaagaacttgttcgcatggtgcaggatgtattacgcccggcatggcgcgaactggtgtcg

SEQ ID NO: 166 - protein, 343 aa, synthetic construct
  REGION 1..343: note = variant of RNA ligase 2 from Escherichia phage RB69 (Bacteriophage RB69)
MHHHHHHGGSGMFKKYSSLENHYNSKFIEKLYKNGLTTGVWVAREKIHGTNFSLIIERDNVTCAKRTGPILPAEDFYGYEIVLKKYDKAIKTVQKFMYTARAVSYQVFGEFAGGGIQKGVDYGEKDFYVFDILINTESGDNTYLTDYEMQDFCNEFGFKMAPMLGRGTFDSLIMIPNDFDSVLAAYNATASEDLVKANNCVFDANVIGLNTAEGYVLKPCEPKWLPNGTRVAIKCKNSKFSEKKKSDKPIKTQVPLTEIDKNLLDVLACYVTLNRVNNVISKIGTVTPKDFGKVMGLTVQDILEETSREGIVLTTSDNPNLVKKELVRMVQDVLRPAWRELVS

SEQ ID NO: 167 - DNA, 1029 bp, synthetic construct
  misc_feature 1..1029: note = variant of RNA ligase 2 from Escherichia phage RB69 (Bacteriophage RB69)
  source 1..1029: mol_type = other DNA
atgcatcaccatcaccatcacggtggcagcggtatgtttaagaaatattctagtctggaaaaccattacaatagcaaattcattgagaaactctataccaacggcttaactactggtgtgtgggttgcgcgcgaaaagatccacgggacgaacttttcgctgattatcgagcgtgataatgtaacatgcgccaaacgtacaggcccgattttgcctgcagaagacttctacggttatgaaatcgtcctgaagaaatacgataaagcgattaagacggtgcagaaatttatgtataccgcccgcgcggtttcctaccaagtgttcggagaatttgctggcggcggtatccagaaaggtgtcgattatggcgagaaagacttctatgtgtttgatattctgatcaatacggaatcaggagacaacacgtacctgactgattatgaaatgcaggacttctgtaatgaatttgggtttaagatggcaccaatgcttggtcgcggcacattcgatagcctgattatgattccgaacgatttcgattcggttctccgcgcttacaatgcaacggcgagcgaggacctggtagaagcgaacaactgcgtctttgatgccaatgtgattggtgataacactgctgaaggctatgttcttaaaccgtgtttccccaaatggttaccgaatgggacgcgtgtggcgatcaaatgcaagaactccaaattcagcgagaagaagaaaagtgacaaaccgatcaagacacaagtcccactgacggaaattgataagaatctgctggacgtattggcctgttacgtcactttaaaccgcgtgaacaacgtgatctctaagattggaacagtgacgccgaaagattttggcaaagtaatgggtctgactgttcaggatattctggaagaaacgtcacgtgagggtattgttctgacgacatcggacaatcctgacctcgtcaagaaagaacttgttcgcatggtgcaggatgtattagaatcggcatggcgcgaactggtgtcg

SEQ ID NO: 168 - protein, 343 aa, synthetic construct
  REGION 1..343: note = variant of RNA ligase 2 from Escherichia phage RB69 (Bacteriophage RB69)
MHHHHHHGGSGMFKKYSSLENHYNSKFIEKLYTNGLTTGVWVAREKIHGTNFSLIIERDNVTCAKRTGPILPAEDFYGYEIVLKKYDKAIKTVQKFMYTARAVSYQVFGEFAGGGIQKGVDYGEKDFYVFDILINTESGDNTYLTDYEMQDFCNEFGFKMAPMLGRGTFDSLIMIPNDFDSVLRAYNATASEDLVEANNCVFDANVIGDNTAEGYVLKPCFPKWLPNGTRVAIKCKNSKFSEKKKSDKPIKTQVPLTEIDKNLLDVLACYVTLNRVNNVISKIGTVTPKDFGKVMGLTVQDILEETSREGIVLTTSDNPDLVKKELVRMVQDVLESAWRELVS

SEQ ID NO: 169 - DNA, 1029 bp, synthetic construct
  misc_feature 1..1029: note = variant of RNA ligase 2 from Escherichia phage RB69 (Bacteriophage RB69)
  source 1..1029: mol_type = other DNA
atgcatcaccatcaccatcacggtggcagcggtatgtttaagaaatattctagtctggaaaaccattacaatagcaaattcattgagaaactctataccaacggcttaactactggtgtgtgggttgcgcgcgaaaagatccacgggacgaacttttcgctgattatcgagcgtgataatgtaacatgcgccaaacgtacaggcccgattttgcctgcagaagacttctacggttatgaaatcgtcctgaagaaatacgataaagcgattaagacggtgcagaaatttatgtataccgccggcgcggtttcctaccaagtgttcggagaatttgctggcggcggtatccagaaaggtgtcgattatggcgagaaagacttctatgtgtttgatattctgatcaatacggaatcaggagacaacacgtacctgactgattatgaaatgcaggacttctgtaatgaatttgggtttaagatggcaccaatgcttggtcgcggcacattcgatagcctgattatgattccgaacgatttcgattcggttctcgccgcttacaatgcaacggcgagcgaggacctggtagaagcgaacaactgcgtctttgatgccaatgtgattggtctgaacactgctgaaggctatgttcttaaaccgtgtttccccaaatggttaccgaatgggacgcgtgtggcgatcaaatgcaagaactccaaattcagcgagaagaagaaaagtgacaaaccgatcaagacacaagtcccactgacggaaattgataagaatctgctggacgtattggcctgttacgtcactttaaaccgcgtgaacaacgtgatctctaagattggaacagtgacgccgaaagattttggcaaagtaatgggtctgactgttcaggatattctggaagaaacgtcacgtgagggtattgttctgacgacatcggacaatcctaacctcgtcaagaaagaacttgttcgcatggtgcaggatgtattagaatcggcatggcgcgaactggtgtcg

SEQ ID NO: 170 - protein, 343 aa, synthetic construct
  REGION 1..343: note = variant of RNA ligase 2 from Escherichia phage RB69 (Bacteriophage RB69)
MHHHHHHGGSGMFKKYSSLENHYNSKFIEKLYTNGLTTGVWVAREKIHGTNFSLIIERDNVTCAKRTGPILPAEDFYGYEIVLKKYDKAIKTVQKFMYTAGAVSYQVFGEFAGGGIQKGVDYGEKDFYVFDILINTESGDNTYLTDYEMQDFCNEFGFKMAPMLGRGTFDSLIMIPNDFDSVLAAYNATASEDLVEANNCVFDANVIGLNTAEGYVLKPCFPKWLPNGTRVAIKCKNSKFSEKKKSDKPIKTQVPLTEIDKNLLDVLACYVTLNRVNNVISKIGTVTPKDFGKVMGLTVQDILEETSREGIVLTTSDNPNLVKKELVRMVQDVLESAWRELVS

SEQ ID NO: 171 - DNA, 1029 bp, synthetic construct
  misc_feature 1..1029: note = variant of RNA ligase 2 from Escherichia phage RB69 (Bacteriophage RB69)
  source 1..1029: mol_type = other DNA
atgcatcaccatcaccatcacggtggcagcggtatgtttaagaaatattctagtctggaaaaccattacaatagcaaattcattgagaaactctataccaacggcttaactactggtgtgtgggttgcgcgcgaaaagatccacgggacgaacttttcgctgattatcgagcgtgataatgtaacatgcgccaaacgtacaggcccgattttgcctgcagaagacttctacggttatgaaatcgtcctgaagaaatacgataaagcgattaagacggtgcagaaatttatgtataccgccggcgcggtttcctaccaagtgttcggagaatttgctggcggcggtatccagaaaggtgtcgattatggcgagaaagacttctatgtgtttgatattctgatcaatacggaatcaggagacaacacgtacctgactgattatgaaatgcaggacttctgtaatgaatttgggtttaagatggcaccaatgcttggtcgcggcacattcgatagcctgattatgattccgaacgatttcgattcggttctcgccgcttacaatgcaacggcgagcgaggacctggtaaaagcgaacaactgcgtctttgatgccaatgtgattggtctgaacactgctgaaggctatgttcttaaaccgtgtttccccaaatggttaccgaatgggacgcgtgtggcgatcaaatgcaagaactccaaattcagcgagaagaagaaaagtgacaaaccgatcaagacacaagtcccactgacggaaattgataagaatctgctggacgtattggcctgttacgtcactttaaaccgcgtgaacaacgtgatctctaagattggaacagtgacgccgaaagattttggcaaagtaatgggtctgactgttcaggatattctggaagaaacgtcacgtgagggtattgttctgacgacatcggacaatcctaatctcgtcaagaaagaacttgttcgcatggtgcaggatgtattacgtcccgcatggcgcgaactggtgtcg

SEQ ID NO: 172 - protein, 343 aa, synthetic construct
  REGION 1..343: note = variant of RNA ligase 2 from Escherichia phage RB69 (Bacteriophage RB69)
MHHHHHHGGSGMFKKYSSLENHYNSKFIEKLYTNGLTTGVWVAREKIHGTNFSLIIERDNVTCAKRTGPILPAEDFYGYEIVLKKYDKAIKTVQKFMYTAGAVSYQVFGEFAGGGIQKGVDYGEKDFYVFDILINTESGDNTYLTDYEMQDFCNEFGFKMAPMLGRGTFDSLIMIPNDFDSVLAAYNATASEDLVKANNCVFDANVIGLNTAEGYVLKPCFPKWLPNGTRVAIKCKNSKFSEKKKSDKPIKTQVPLTEIDKNLLDVLACYVTLNRVNNVISKIGTVTPKDFGKVMGLTVQDILEETSREGIVLTTSDNPNLVKKELVRMVQDVLRPAWRELVS

SEQ ID NO: 173 - DNA, 1029 bp, synthetic construct
  misc_feature 1..1029: note = variant of RNA ligase 2 from Escherichia phage RB69 (Bacteriophage RB69)
  source 1..1029: mol_type = other DNA
atgcatcaccatcaccatcacggtggcagcggtatgtttaagaaatattctagtctggaaaaccattacaatagcaaattcattgagaaactctataccaacggcttaactactggtgagtgggttgcgcgcgaaaagatccacgggacgaacttttcgctgattatcgagcgtgataatgtaacatgcgccaaacgtacaggcccgattaaacctgcagaagacttctacggttatgaaatcatcctgaagaaatacgataaagcgattaagacggtgcagaaatttatgtataccgcccgcgcggtttcctaccaagtgttcggagaatttgctggcgggggtatccagaaaggtgtcgattatggcgagaaagacttctatgtgtttgatattctgatcaatacggaatcaggagacaacacgtacctgactgattatgaaatgcaggacttctgtaatgaatttgggtttaagatggcaccaatgcttggtcgcggcacattcgaagaactgattatgattccgaacgatctggattcggttctcgcagcttacaatgcaacggcgagcgaggacctggtagaagcgaacaactgcgtctgggatgccaatgtgatcggtgataacactgctgaaggctatgttcttaaaccgtgtttccccaaatggttaccgaatgggacgcgtgtggcgatcaaatgcaagaactccaaattcagcgagaagaagaaaagtgacaaaccgatcaagacacaagtcccactgacggaaattgataagaatctgctggacgtattggcctgttacgtcactttaaaccgcgtgaacaacgtgatctctaagattggaacagtgacgccgaaagattttggcaaagtaatgggtctgactgttcaggatattctggaagaaacgtcacgtgagggtattgttctgacgacatcggacaatcctaatctcgtcaagaaagaacttcagcgcatggtgcaggatgtattacgtcccgcatggatcgaactggtgtcg

SEQ ID NO: 174 - protein, 343 aa, synthetic construct
  REGION 1..343: note = variant of RNA ligase 2 from Escherichia phage RB69 (Bacteriophage RB69)
MHHHHHHGGSGMFKKYSSLENHYNSKFIEKLYTNGLTTGEWVAREKIHGTNFSLIIERDNVTCAKRTGPIKPAEDFYGYEIILKKYDKAIKTVQKFMYTARAVSYQVFGEFAGGGIQKGVDYGEKDFYVFDILINTESGDNTYLTDYEMQDFCNEFGFKMAPMLGRGTFEELIMIPNDLDSVLAAYNATASEDLVEANNCVWDANVIGDNTAEGYVLKPCFPKWLPNGTRVAIKCKNSKFSEKKKSDKPIKTQVPLTEIDKNLLDVLACYVTLNRVNNVISKIGTVTPKDFGKVMGLTVQDILEETSREGIVLTTSDNPNLVKKELQRMVQDVLRPAWIELVS

SEQ ID NO: 175 - DNA, 1029 bp, synthetic construct
  misc_feature 1..1029: note = variant of RNA ligase 2 from Escherichia phage RB69 (Bacteriophage RB69)
  source 1..1029: mol_type = other DNA
atgcatcaccatcaccatcacggtggcagcggtatgtttaagaaatattctagtctggaaaaccattacaatagcaaattcattgagaaactctatactaacggcttaactactggtgtgtgggttgcgcgcgaaaagatccacgggacgaacttttcgctgattatcgagcgtgataatgtaacatgcgccaaacgtacaggcccgattttgcctgcagaagacttctacggttatgaaatcgtcctgaagaaatacgataaagcgattaagacggtgcagaaatttatgtataccgcccgcgcggtttcctaccaagtgttcggagaatttgctggcggcggtatccagaaaggtgtcgattatggcgagaaagacttctatgtgtttgatattctgatcaatacggaatcaggagacaacacgtacctgactgattatgaaatgcaggacttctgtaatgaatttgggtttaagatggcaccaatgcttggtcgcggcacattcgatagcctgattatgattccgaacgatttcgattcggttctcgccgcttacaatgcaacggcgagcgaggacctggtagaagcgaacaactgcgtctttgatgccaatgtgatcggtgataacactgctgaaggctatgttcttaaaccgtgtttccccaaatggttaccgaatgggacgcgtgtggcgatcaaatgcaagaactccaaattcagcgagaagaagaaaagtgacaaaccgatcaagacacaagtcccactgacggaaattgataagaatctgctggacgtattggcctgttacgtcactttaaaccgcgtgaacaacgtgatctctaagattggaacagtgacgccgaaagattttggcaaagtaatgggtctgactgttcaggatattctggaagaaacgtcacgtgagggtattgttctgacgacatcggacaatcctgacctcgtcaagaaagaacttgttcgcatggtgcaggatgtattagaatcggcatggcgcgaactggtgtcg

SEQ ID NO: 176 - protein, 343 aa, synthetic construct
  REGION 1..343: note = variant of RNA ligase 2 from Escherichia phage RB69 (Bacteriophage RB69)
MHHHHHHGGSGMFKKYSSLENHYNSKFIEKLYTNGLTTGVWVAREKIHGTNFSLIIERDNVTCAKRTGPILPAEDFYGYEIVLKKYDKAIKTVQKFMYTARAVSYQVFGEFAGGGIQKGVDYGEKDFYVFDILINTESGDNTYLTDYEMQDFCNEFGFKMAPMLGRGTFDSLIMIPNDFDSVLAAYNATASEDLVEANNCVFDANVIGDNTAEGYVLKPCFPKWLPNGTRVAIKCKNSKFSEKKKSDKPIKTQVPLTEIDKNLLDVLACYVTLNRVNNVISKIGTVTPKDFGKVMGLTVQDILEETSREGIVLTTSDNPDLVKKELVRMVQDVLESAWRELVS

SEQ ID NO: 177 - DNA, 1029 bp, synthetic construct
  misc_feature 1..1029: note = variant of RNA ligase 2 from Escherichia phage RB69 (Bacteriophage RB69)
  source 1..1029: mol_type = other DNA
atgcatcaccatcaccatcacggtggcagcggtatgtttaagaaatattctagtctggaaaaccattacaatagcaaattcattgagaaactctataccaacggcttaactactggtgtgtgggttgcgcgcgaaaagatccacgggacgaacttttcgctgattatcgagcgtgataatgtaacatgcgccaaacgtacaggcccgattttgcctgcagaagacttctacggttatgaaatcgtcctgaagaaatacgataaagcgattaagacggtgcagaaatttatgtataccgccggcgcggtttcctaccaagtgttcggagaatttgctggcggcggtatccagaaaggtgtcgattatggcgagaaagacttctatgtgtttgatattctgatcaatacggaatcaggagacaacacgtacctgactgattatgaaatgcaggacttctgtaatgaatttgggtttaagatggcaccaatgcttggtcgcggcacattcgatagcctgattatgattccgaacgatttcgattcggttctcctggcttacaatgcaacggcgagcgaggacctggtagaagcgaacaactgcgtctttgatgccaatgtgatcggtgataacactgctgaaggctatgttcttaaaccgtgtttccccaaatggttaccgaatgggacgcgtgtggcgatcaaatgcaagaactccaaattcagcgagaagaagaaaagtgacaaaccgatcaagacacaagtcccactgacggaaattgataagaatctgctggacgtattggcctgttacgtcactttaaaccgcgtgaacaacgtgatctctaagattggaacagtgacgccgaaagattttggcaaagtaatgggtctgactgttaaggatattctggaagaaacgtcacgtgagggtattgttctgacgacatcggacaatcctaatctcgtcaagaaagaacttgttcgcatggtgcaggatgtattagaatcggcatggcgcgaactggtgtcg

SEQ ID NO: 178 - protein, 343 aa, synthetic construct
  REGION 1..343: note = variant of RNA ligase 2 from Escherichia phage RB69 (Bacteriophage RB69)
MHHHHHHGGSGMFKKYSSLENHYNSKFIEKLYTNGLTTGVWVAREKIHGTNFSLIIERDNVTCAKRTGPILPAEDFYGYEIVLKKYDKAIKTVQKFMYTAGAVSYQVFGEFAGGGIQKGVDYGEKDFYVFDILINTESGDNTYLTDYEMQDFCNEFGFKMAPMLGRGTFDSLIMIPNDFDSVLLAYNATASEDLVEANNCVFDANVIGDNTAEGYVLKPCFPKWLPNGTRVAIKCKNSKFSEKKKSDKPIKTQVPLTEIDKNLLDVLACYVTLNRVNNVISKIGTVTPKDFGKVMGLTVKDILEETSREGIVLTTSDNPNLVKKELVRMVQDVLESAWRELVS

SEQ ID NO: 179 - DNA, 1029 bp, synthetic construct
  misc_feature 1..1029: note = variant of RNA ligase 2 from Escherichia phage RB69 (Bacteriophage RB69)
  source 1..1029: mol_type = other DNA
atgcatcaccatcaccatcacggtggcagcggtatgtttaagaaatattctagtctggaaaaccattacaatagcaaattcattgagaaactctataaaaacggcttaactactggtgtgtgggttgcgcgcgaaaagatccacgggacgaacttttcgctgattatcgagcgtgataatgtaacatgcgccaaacgtacaggcccgattttgcctgcagaagacttctacggttatgaaatcgtcctgaagaaatacgataaagcgattaagacggtgcagaaatttatgtataccgccggcgcggtttcctaccaagtgttcggagaatttgctggcggcggtatccagaaaggtgtcgattatggcgagaaagacttctatgtgtttgatattctgatcaatacggaatcaggagacaacacgtacctgactgattatgaaatgcaggacttctgtaatgaatttgggtttaagatggcaccaatgcttggtcgcggcacattcgatagcctgattatgattccgaacgatttcgattcggttctcgctgcttacaatgcaacggcgagcgaggacctggtaaaagcgaacaactgcgtctttgatgccaatgtgattggtctgaacactgctgaaggctatgttcttaaaccgtgttttcccaaatggttaccgaatgggacgcgtgtggcgatcaaatgcaagaactccaaattcagcgagaagaagaaaagtgacaaaccgatcaagacacaagtcccactgacggaaattgataagaatctgctggacgtattggcctgttacgtcactttaaaccgcgtgaacaacgtgatctctaagattggaacagtgacgccgaaagattttggcaaagtaatgggtctgactgttcaggatattctggaagaaacgtcacgtgagggtattgttctgacgacatcggacaatcctaatctcgtcaagaaagaacttgttcgcatggtgcaggatgtattagaatcggcatggcgcgaactggtgtcg

SEQ ID NO: 180 - protein, 343 aa, synthetic construct
  REGION 1..343: note = variant of RNA ligase 2 from Escherichia phage RB69 (Bacteriophage RB69)
MHHHHHHGGSGMFKKYSSLENHYNSKFIEKLYKNGLTTGVWVAREKIHGTNFSLIIERDNVTCAKRTGPILPAEDFYGYEIVLKKYDKAIKTVQKFMYTAGAVSYQVFGEFAGGGIQKGVDYGEKDFYVFDILINTESGDNTYLTDYEMQDFCNEFGFKMAPMLGRGTFDSLIMIPNDFDSVLAAYNATASEDLVKANNCVFDANVIGLNTAEGYVLKPCFPKWLPNGTRVAIKCKNSKFSEKKKSDKPIKTQVPLTEIDKNLLDVLACYVTLNRVNNVISKIGTVTPKDFGKVMGLTVQDILEETSREGIVLTTSDNPNLVKKELVRMVQDVLESAWRELVS

SEQ ID NO: 181 - DNA, 1029 bp, synthetic construct
  misc_feature 1..1029: note = variant of RNA ligase 2 from Escherichia phage RB69 (Bacteriophage RB69)
  source 1..1029: mol_type = other DNA
atgcatcaccatcaccatcacggtggcagcggtatgtttaagaaatattctagtctggaaaaccattacaatagcaaattcattgagaaactctataaaaacggcttaactactggtgtgtgggttgcgcgcgaaaagatccacgggacgaacttttcgctgattatcgagcgtgataatgtaacatgcgccaaacgtacaggcccgattttgcctgcagaagacttctacggttatgaaatcgtcctgaagaaatacgataaagcgattaagacggtgcagaaatttatgtataccgcccgcgcggtttcctaccaagtgttcggagaatttgctggcggcggtatccagaaaggtgtcgattatggcgagaaagacttctatgtgtttgatattctgatcaatacggaatcaggagacaacacgtacctgactgattatgaaatgcaggacttctgtaatgaatttgggtttaagatggcaccaatgcttggtcgcggcacattcgatagcctgattatgattccgaacgatttcgattcggttctcgccgcttacaatgcaacggcgagcgaggacctggtaaaagcgaacaactgcgtctttgatgccaatgtgatcggtgataacactgctgaaggctatgttcttaaaccgtgtttccccaaatggttaccgaatgggacgcgtgtggcgatcaaatgcaagaactccaaattcagcgagaagaagaaaagtgacaaaccgatcaagacacaagtcccactgacggaaattgataagaatctgctggacgtattggcctgttacgtcactttaaaccgcgtgaacaacgtgatctctaagattggaacagtgacgccgaaagattttggcaaagtaatgggtctgactgttaaggatattctggaagaaacgtcacgtgagggtattgttctgacgacatcggacaatcctgacctcgtcaagaaagaacttgttcgcatggtgcaggatgtattacgtcccgcatggatcgaactggtgtcg

SEQ ID NO: 182 - protein, 343 aa, synthetic construct
  REGION 1..343: note = variant of RNA ligase 2 from Escherichia phage RB69 (Bacteriophage RB69)
MHHHHHHGGSGMFKKYSSLENHYNSKFIEKLYKNGLTTGVWVAREKIHGTNFSLIIERDNVTCAKRTGPILPAEDFYGYEIVLKKYDKAIKTVQKFMYTARAVSYQVFGEFAGGGIQKGVDYGEKDFYVFDILINTESGDNTYLTDYEMQDFCNEFGFKMAPMLGRGTFDSLIMIPNDFDSVLAAYNATASEDLVKANNCVFDANVIGDNTAEGYVLKPCFPKWLPNGTRVAIKCKNSKFSEKKKSDKPIKTQVPLTEIDKNLLDVLACYVTLNRVNNVISKIGTVTPKDFGKVMGLTVKDILEETSREGIVLTTSDNPDLVKKELVRMVQDVLRPAWIELVS

SEQ ID NO: 183 - DNA, 1029 bp, synthetic construct
  misc_feature 1..1029: note = variant of RNA ligase 2 from Escherichia phage RB69 (Bacteriophage RB69)
  source 1..1029: mol_type = other DNA
atgcatcaccatcaccatcacggtggcagcggtatgtttaagaaatattctagtctggaaaaccattacaatagcaaattcattgagaaactctataccaacggcttaactactggtgtgtgggttgcgcgcgaaaagatccacgggacgaacttttcgctgattatcgagcgtgataatgtaacatgcgccaaacgtacaggcccgattttgcctgcagaagacttctacggttatgaaatcgtcctgaagaaatacgataaagcgattaagacggtgcagaaatttatgtataccgcccgcgcggtttcctaccaagtgttcggagaatttgctggcggcggtatccagaaaggtgtcgattatggcgagaaagacttctatgtgtttgatattctgatcaatacggaatcaggagacaacacgtacctgactgattatgaaatgcaggacttctgtaatgaatttgggtttaagatggcaccaatgcttggtcgcggcacattcgatagcctgattatgattccgaacgatttcgattcggttctcgctgcttacaatgcaacggcgagcgaggacctggtagaagcgaacaactgcgtctttgatgccaatgtgatcggtgataacactgctgaaggctatgttcttaaaccgtgtgaacccaaatggttaccgaatgggacgcgtgtggcgatcaaatgcaagaactccaaattcagcgagaagaagaaaagtgacaaaccgatcaagacacaagtcccactgacggaaattgataagaatctgctggacgtattggcctgttacgtcactttaaaccgcgtgaacaacgtgatctctaagattggaacagtgacgccgaaagattttggcaaagtaatgggtctgactgttcaggatattctggaagaaacgtcacgtgagggtattgttctgacgacatcggacaatcctaatctcgtcaagaaagaacttgttcgcatggtgcaggatgtattagaaccggcatggatcgaactggtgtcg

SEQ ID NO: 184 - protein, 343 aa, synthetic construct
  REGION 1..343: note = variant of RNA ligase 2 from Escherichia phage RB69 (Bacteriophage RB69)
MHHHHHHGGSGMFKKYSSLENHYNSKFIEKLYTNGLTTGVWVAREKIHGTNFSLIIERDNVTCAKRTGPILPAEDFYGYEIVLKKYDKAIKTVQKFMYTARAVSYQVFGEFAGGGIQKGVDYGEKDFYVFDILINTESGDNTYLTDYEMQDFCNEFGFKMAPMLGRGTFDSLIMIPNDFDSVLAAYNATASEDLVEANNCVFDANVIGDNTAEGYVLKPCEPKWLPNGTRVAIKCKNSKFSEKKKSDKPIKTQVPLTEIDKNLLDVLACYVTLNRVNNVISKIGTVTPKDFGKVMGLTVQDILEETSREGIVLTTSDNPNLVKKELVRMVQDVLEPAWIELVS

SEQ ID NO: 185 - DNA, 1029 bp, synthetic construct
  misc_feature 1..1029: note = variant of RNA ligase 2 from Escherichia phage RB69 (Bacteriophage RB69)
  source 1..1029: mol_type = other DNA
atgcatcaccatcaccatcacggtggcagcggtatgtttaagaaatattctagtctggaaaaccattacaatagcaaattcattgagaaactctataaaaacggcttaactactggtgtgtgggttgcgcgcgaaaagatccacgggacgaacttttcgctgattatcgagcgtgataatgtaacatgcgccaaacgtacaggcccgattttgcctgcagaagacttctacggttatgaaatcgtcctgaagaaatacgataaagcgattaagacggtgcagaaatttatgtataccgcccgcgcggtttcctaccaagtgttcggagaatttgctggcggcggtatccagaaaggtgtcgattatggcgagaaagacttctatgtgtttgatattctgatcaatacggaatcaggagacaacacgtacctgactgattatgaaatgcaggacttctgtaatgaatttgggtttaagatggcaccaatgcttggtcgcggcacattcgatagcctgattatgattccgaacgatttcgattcggttctccgcgcttacaatgcaacggcgagcgaggacctggtaaaagcgaacaactgcgtctttgatgccaatgtgagtggtgataacactgctgaaggctatgttcttaaaccgtgtgaacccaaatggttaccgaatgggacgcgtgtggcgatcaaatgcaagaactccaaattcagcgagaagaagaaaagtgacaaaccgatcaagacacaagtcccactgacggaaattgataagaatctgctggacgtattggcctgttacgtcactttaaaccgcgtgaacaacgtgatctctaagattggaacagtgacgccgaaagattttggcaaagtaatgggtctgactgttcaggatattctggaagaaacgtcacgtgagggtattgttctgacgacatcggacaatcctaatctcgtcaagaaagaacttgttcgcatggtgcaggatgtattacgcccggcatggatcgaactggtgtcg

SEQ ID NO: 186 - protein, 343 aa, synthetic construct
  REGION 1..343: note = variant of RNA ligase 2 from Escherichia phage RB69 (Bacteriophage RB69)
MHHHHHHGGSGMFKKYSSLENHYNSKFIEKLYKNGLTTGVWVAREKIHGTNFSLIIERDNVTCAKRTGPILPAEDFYGYEIVLKKYDKAIKTVQKFMYTARAVSYQVFGEFAGGGIQKGVDYGEKDFYVFDILINTESGDNTYLTDYEMQDFCNEFGFKMAPMLGRGTFDSLIMIPNDFDSVLRAYNATASEDLVKANNCVFDANVSGDNTAEGYVLKPCEPKWLPNGTRVAIKCKNSKFSEKKKSDKPIKTQVPLTEIDKNLLDVLACYVTLNRVNNVISKIGTVTPKDFGKVMGLTVQDILEETSREGIVLTTSDNPNLVKKELVRMVQDVLRPAWIELVS

SEQ ID NO: 187 - DNA, 1029 bp, synthetic construct
  misc_feature 1..1029: note = variant of RNA ligase 2 from Escherichia phage RB69 (Bacteriophage RB69)
  source 1..1029: mol_type = other DNA
atgcatcaccatcaccatcacggtggcagcggtatgtttaagaaatattctagtctggaaaaccattacaatagcaaattcattgagaaactctataccaacggcttaactactggtgtgtgggttgcgcgcgaaaagatccacgggacgaacttttcgctgattatcgagcgtgataatgtaacatgcgccaaacgtacaggcccgattttgcctgcagaagacttctacggttatgaaatcgtcctgaagaaatacgataaagcgattaagacggtgcagaaatttatgtataccgcccgcgcggtttcctaccaagtgttcggagaatttgctggcggcggtatccagaaaggtgtcgattatggcgagaaagacttctatgtgtttgatattctgatcaatacggaatcaggagacaacacgtacctgactgattatgaaatgcaggacttctgtaatgaatttgggtttaagatggcaccaatgcttggtcgcggcacattcgatagcctgattatgattccgaacgatttcgattcggttctcgctgcttacaatgcaacggcgagcgaggacctggtagaagcgaacaactgcgtctttgatgccaatgtgatcggtgataacactgctgaaggctatgttcttaaaccgtgtgaacccaaatggttaccgaatgggacgcgtgtggcgatcaaatgcaagaactccaaattcagcgagaagaagaaaagtgacaaaccgatcaagacacaagtcccactgacggaaattgataagaatctgctggacgtattggcctgttacgtcactttaaaccgcgtgaacaacgtgatctctaagattggaacagtgacgccgaaagattttggcaaagtaatgggtctgactgttcaggatattctggaagaaacgtcacgtgagggtattgttctgacgacatcggacaatcctaatctcgtcaagaaagaacttgttcgcatggtgcaggatgtattagaatcggcatggcgcgaactggtgtcg

SEQ ID NO: 188 - protein, 343 aa, synthetic construct
  REGION 1..343: note = variant of RNA ligase 2 from Escherichia phage RB69 (Bacteriophage RB69)
MHHHHHHGGSGMFKKYSSLENHYNSKFIEKLYTNGLTTGVWVAREKIHGTNFSLIIERDNVTCAKRTGPILPAEDFYGYEIVLKKYDKAIKTVQKFMYTARAVSYQVFGEFAGGGIQKGVDYGEKDFYVFDILINTESGDNTYLTDYEMQDFCNEFGFKMAPMLGRGTFDSLIMIPNDFDSVLAAYNATASEDLVEANNCVFDANVIGDNTAEGYVLKPCEPKWLPNGTRVAIKCKNSKFSEKKKSDKPIKTQVPLTEIDKNLLDVLACYVTLNRVNNVISKIGTVTPKDFGKVMGLTVQDILEETSREGIVLTTSDNPNLVKKELVRMVQDVLESAWRELVS

SEQ ID NO: 189 - DNA, 1029 bp, synthetic construct
  misc_feature 1..1029: note = variant of RNA ligase 2 from Escherichia phage RB69 (Bacteriophage RB69)
  source 1..1029: mol_type = other DNA
atgcatcaccatcaccatcacggtggcagcggtatgtttaagaaatattctagtctggaaaaccattacaatagcaaattcattgagaaactctatactaacggcttaactactggtgtgtgggttgcgcgcgaaaagatccacgggacgaacttttcgctgattatcgagcgtgataatgtaacatgcgccaaacgtacaggcccgattttgcctgcagaagacttctacggttatgaaatcgtcctgaagaaatacgataaagcgattaagacggtgcagaaatttatgtataccgcccgcgcggtttcctaccaagtgttcggagaatttgctggcggcggtatccagaaaggtgtcgattatggcgagaaagacttctatgtgtttgatattctgatcaatacggaatcaggagacaacacgtacctgactgattatgaaatgcaggacttctgtaatgaatttgggtttaagatggcaccaatgcttggtcgcggcacattcgatagcctgattatgattccgaacgatttcgattcggttctcgctgcttacaatgcaacggcgagcgaggacctggtaaaagcgaacaactgcgtctttgatgccaatgtgattggtctgaacactgctgaaggctatgttcttaaaccgtgtttccccaaatggttaccgaatgggacgcgtgtggcgatcaaatgcaagaactccaaattcagcgagaagaagaaaagtgacaaaccgatcaagacacaagtcccactgacggaaattgataagaatctgctggacgtattggcctgttacgtcactttaaaccgcgtgaacaacgtgatctctaagattggaacagtgacgccgaaagattttggcaaagtaatgggtctgactgttaaggatattctggaagaaacgtcacgtgagggtattgttctgacgacatcggacaatcctaatctcgtcaagaaagaacttgttcgcatggtgcaggatgtattagaatcggcatggcgcgaactggtgtcg

SEQ ID NO: 190 - protein, 343 aa, synthetic construct
  REGION 1..343: note = variant of RNA ligase 2 from Escherichia phage RB69 (Bacteriophage RB69)
MHHHHHHGGSGMFKKYSSLENHYNSKFIEKLYTNGLTTGVWVAREKIHGTNFSLIIERDNVTCAKRTGPILPAEDFYGYEIVLKKYDKAIKTVQKFMYTARAVSYQVFGEFAGGGIQKGVDYGEKDFYVFDILINTESGDNTYLTDYEMQDFCNEFGFKMAPMLGRGTFDSLIMIPNDFDSVLAAYNATASEDLVKANNCVFDANVIGLNTAEGYVLKPCFPKWLPNGTRVAIKCKNSKFSEKKKSDKPIKTQVPLTEIDKNLLDVLACYVTLNRVNNVISKIGTVTPKDFGKVMGLTVKDILEETSREGIVLTTSDNPNLVKKELVRMVQDVLESAWRELVS

SEQ ID NO: 191 - DNA, 1029 bp, synthetic construct
  misc_feature 1..1029: note = variant of RNA ligase 2 from Escherichia phage RB69 (Bacteriophage RB69)
  source 1..1029: mol_type = other DNA
atgcatcaccatcaccatcacggtggcagcggtatgtttaagaaatattctagtctggaaaaccattacaatagcaaattcattgagaaactctatactaacggcttaactactggtgtgtgggttgcgcgcgaaaagatccacgggacgaacttttcgctgattatcgagcgtgataatgtaacatgcgccaaacgtacaggcccgattttgcctgcagaagacttctacggttatgaaatcgtcctgaagaaatacgataaagcgattaagacggtgcagaaatttatgtataccgcccgcgcggtttcctaccaagtgttcggagaatttgctggcggcggtatccagaaaggtgtcgattatggcgagaaagacttctatgtgtttgatattctgatcaatacggaatcaggagacaacacgtacctgactgattatgaaatgcaggacttctgtaatgaatttgggtttaagatggcaccaatgcttggtcgcggcacattcgatagcctgattatgattccgaacgatttcgattcggttctccctgcttacaatgcaacggcgagcgaggacctggtaaaagcgaacaactgcgtctttgatgccaatgtgatcggtgataacactgctgaaggctatgttcttaaaccgtgtttccccaaatggttaccgaatgggacgcgtgtggcgatcaaatgcaagaactccaaattcagcgagaagaagaaaagtgacaaaccgatcaagacacaagtcccactgacggaaattgataagaatctgctggacgtattggcctgttacgtcactttaaaccgcgtgaacaacgtgatctctaagattggaacagtgacgccgaaagattttggcaaagtaatgggtctgactgttaaggatattctggaagaaacgtcacgtgagggtattgttctgacgacatcggacaatcctgacctcgtcaagaaagaacttgttcgcatggtgcaggatgtattacgtcccgcatggatcgaactggtgtcg

SEQ ID NO: 192 - protein, 343 aa, synthetic construct
  REGION 1..343: note = variant of RNA ligase 2 from Escherichia phage RB69 (Bacteriophage RB69)
MHHHHHHGGSGMFKKYSSLENHYNSKFIEKLYTNGLTTGVWVAREKIHGTNFSLIIERDNVTCAKRTGPILPAEDFYGYEIVLKKYDKAIKTVQKFMYTARAVSYQVFGEFAGGGIQKGVDYGEKDFYVFDILINTESGDNTYLTDYEMQDFCNEFGFKMAPMLGRGTFDSLIMIPNDFDSVLPAYNATASEDLVKANNCVFDANVIGDNTAEGYVLKPCFPKWLPNGTRVAIKCKNSKFSEKKKSDKPIKTQVPLTEIDKNLLDVLACYVTLNRVNNVISKIGTVTPKDFGKVMGLTVKDILEETSREGIVLTTSDNPDLVKKELVRMVQDVLRPAWIELVS

SEQ ID NO: 193 - DNA, 1029 bp, synthetic construct
  misc_feature 1..1029: note = variant of RNA ligase 2 from Escherichia phage RB69 (Bacteriophage RB69)
  source 1..1029: mol_type = other DNA
atgcatcaccatcaccatcacggtggcagcggtatgtttaagaaatattctagtctggaaaaccattacaatagcaaattcattgagaaactctataccaacggcttaactactggtgtgtgggttgcgcgcgaaaagatccacgggacgaacttttcgctgattatcacccgtgataatgtaacatgcgccaaacgtacaggcccgattttgcctgcagaagacttctacggttatgaaatcgtcctgaagaaatacgataaagcgattaagacggtgcagaaatttatgtataccgcccgcgcggtttcctaccaagtgttcggagaatttgctggcggcggtatccagaaaggtgtcgattatggcgagaaagacttctatgtgtttgatattctgatcaatacggaatcaggagacaacacgtacctgactgattatgaaatgcaggacttctgtaatgaatttgggtttaagatggcaccaatgcttggtcgcggcacattcgatgaactgattatgattccgaacgatttcgattcggttctcgccgcttacaatgcaacggcgagcgaggacctggtagaagcgaacaactgcgtctgggatgccaatgtgatcggtgataacactgctgaaggctatgttcttaaaccgtgtttccccaaatggttaccgaatgggacgcgtgtggcgatcaaatgcaagaactccaaattcagcgagaagaagaaaagtgacaaaccgatcaagacacaagtcccactgacggaaattgataagaatctgctggacgtattggcctgttacgtcactttaaaccgcgtgaacaacgtgatctctaagattggaacagtgacgccgaaagattttggcaaagtaatgggtctgactgttcaggatattctggaagaaacgtcacgtgagggtattgttctgacgacatcggacaatcctaatctcgtcaagaaagaacttcagcgcatggtgcaggatgtattacgtcccgcatggatcgaactggtgtcg

SEQ ID NO: 194 - protein, 343 aa, synthetic construct
  REGION 1..343: note = variant of RNA ligase 2 from Escherichia phage RB69 (Bacteriophage RB69)
MHHHHHHGGSGMFKKYSSLENHYNSKFIEKLYTNGLTTGVWVAREKIHGTNFSLIITRDNVTCAKRTGPILPAEDFYGYEIVLKKYDKAIKTVQKFMYTARAVSYQVFGEFAGGGIQKGVDYGEKDFYVFDILINTESGDNTYLTDYEMQDFCNEFGFKMAPMLGRGTFDELIMIPNDFDSVLAAYNATASEDLVEANNCVWDANVIGDNTAEGYVLKPCFPKWLPNGTRVAIKCKNSKFSEKKKSDKPIKTQVPLTEIDKNLLDVLACYVTLNRVNNVISKIGTVTPKDFGKVMGLTVQDILEETSREGIVLTTSDNPNLVKKELQRMVQDVLRPAWIELVS

SEQ ID NO: 195 - DNA, 1029 bp, synthetic construct
  misc_feature 1..1029: note = variant of RNA ligase 2 from Escherichia phage RB69 (Bacteriophage RB69)
  source 1..1029: mol_type = other DNA
atgcatcaccatcaccatcacggtggcagcggtatgtttaagaaatattctagtctggaaaaccattacaatagcaaattcattgagaaactctataccaacggcttaactactggtgagtgggttgcgcgcgaaaagatccacgggacgaacttttcgctgattatcgagcgtgataatgtaacatgcgccaaacgtacaggcccgattaaacctgcagaagacttctacggttatgaaatcgtcctgaagaaatacgataaagcgattaagacggtgcagaaatttatgtataccgcccgcgcggtttcctaccaagtgttcggagaatttgctggcgggggtatccagaaaggtgtcgattatggcgagaaagacttctatgtgtttgatattctgatcaatacggaatcaggagacaacacgtacctgactgattatgaaatgcaggacttctgtaatgaatttgggtttaagatggcaccaatgcttggtcgcggcacattcgatgaactgattatgattccgaacgattttgattcggttctcccagcttacaatgcaacggcgagcgaggacctggtagaagcgaacaactgcgtcttcgatgccaatgtgatcggtgataacactgctgaaggctatgttcttaaaccgtgtttccccaaatggttaccgaatgggacgcgtgtggcgatcaaatgcaagaactccaaattcagcgagaagaagaaaagtgacaaaccgatcaagacacaagtcccactgacggaaattgataagaatctgctggacgtattggcctgttacgtcactttaaaccgcgtgaacaacgtgatctctaagattggaacagtgacgccgaaagattttggcaaagtaatgggtctgactgttcaggatattctggaagaaacgtcacgtgagggtattgttctgacgacatcggacaatcctaatctcgtcaagaaagaacttgttcgcatggtgcaggatgtattacgtcccgcatggatcgaactggtgtcg

SEQ ID NO: 196 - protein, 343 aa, synthetic construct
  REGION 1..343: note = variant of RNA ligase 2 from Escherichia phage RB69 (Bacteriophage RB69)
MHHHHHHGGSGMFKKYSSLENHYNSKFIEKLYTNGLTTGEWVAREKIHGTNFSLIIERDNVTCAKRTGPIKPAEDFYGYEIVLKKYDKAIKTVQKFMYTARAVSYQVFGEFAGGGIQKGVDYGEKDFYVFDILINTESGDNTYLTDYEMQDFCNEFGFKMAPMLGRGTFDELIMIPNDFDSVLPAYNATASEDLVEANNCVFDANVIGDNTAEGYVLKPCFPKWLPNGTRVAIKCKNSKFSEKKKSDKPIKTQVPLTEIDKNLLDVLACYVTLNRVNNVISKIGTVTPKDFGKVMGLTVQDILEETSREGIVLTTSDNPNLVKKELVRMVQDVLRPAWIELVS

SEQ ID NO: 197 - DNA, 1029 bp, synthetic construct
  misc_feature 1..1029: note = variant of RNA ligase 2 from Escherichia phage RB69 (Bacteriophage RB69)
  source 1..1029: mol_type = other DNA
atgcatcaccatcaccatcacggtggcagcggtatgtttaagaaatattctagtctggaaaaccattacaatagcaaattcattgagaaactctataccaacggcttaactactggtgtgtgggttgcgcgcgaaaagatccacgggacgaacttttcgctgattatcgagcgtgataatgtaacatgcgccaaacgtacaggcccgattttgcctgcagaagacttctacggttatgaaatcgtcctgaagaaatacgataaagcgattaagacggtgcagaaatttatgtataccgcccgcgcggtttcctaccaagtgttcggagaatttgctggcggcggtatccagaaaggtgtcgattatggcgagaaagacttctatgtgtttgatattctgatcaatacggaatcaggagacaacacgtacctgactgattatgaaatgcaggacttctgtaatgaatttgggtttaagatggcaccaatgcttggtcgcggcacattcgatagcctgattatgattccgaacgatttcgattcggttctcctggcttacaatgcaacggcgagcgaggacctggtaaaagcgaacaactgcgtctttgatgccaatgtgatcggtgataacactgctgaaggctatgttcttaaaccgtgtgaacccaaatggttaccgaatgggacgcgtgtggcgatcaaatgcaagaactccaaattcagcgagaagaagaaaagtgacaaaccgatcaagacacaagtcccactgacggaaattgataagaatctgctggacgtattggcctgttacgtcactttaaaccgcgtgaacaacgtgatctctaagattggaacagtgacgccgaaagattttggcaaagtaatgggtctgactgttcaggatattctggaagaaacgtcacgtgagggtattgttctgacgacatcggacaatcctaacctcgtcaagaaagaacttgttcgcatggtgcaggatgtattacgtcccgcatggatcgaactggtgtcg

SEQ ID NO: 198 - protein, 343 aa, synthetic construct
  REGION 1..343: note = variant of RNA ligase 2 from Escherichia phage RB69 (Bacteriophage RB69)
MHHHHHHGGSGMFKKYSSLENHYNSKFIEKLYTNGLTTGVWVAREKIHGTNFSLIIERDNVTCAKRTGPILPAEDFYGYEIVLKKYDKAIKTVQKFMYTARAVSYQVFGEFAGGGIQKGVDYGEKDFYVFDILINTESGDNTYLTDYEMQDFCNEFGFKMAPMLGRGTFDSLIMIPNDFDSVLLAYNATASEDLVKANNCVFDANVIGDNTAEGYVLKPCEPKWLPNGTRVAIKCKNSKFSEKKKSDKPIKTQVPLTEIDKNLLDVLACYVTLNRVNNVISKIGTVTPKDFGKVMGLTVQDILEETSREGIVLTTSDNPNLVKKELVRMVQDVLRPAWIELVS

SEQ ID NO: 199 - DNA, 1029 bp, synthetic construct
  misc_feature 1..1029: note = variant of RNA ligase 2 from Escherichia phage RB69 (Bacteriophage RB69)
  source 1..1029: mol_type = other DNA
atgcatcaccatcaccatcacggtggcagcggtatgtttaagaaatattctagtctggaaaaccattacaatagcaaattcattgagaaactctatgctaacggcttaactactggtgtgtgggttgcgcgcgaaaagatccacgggacgaacttttcgctgattatcgagcgtgataatgtaacatgcgccaaacgtacaggcccgattttgcctgcagaagacttctacggttatgaaatcgtcctgaagaaatacgataaagcgattaagacggtgcagaaatttatgtataccgcccgcgcggtttcctaccaagtgttcggagaatttgctggcggcggtatccagaaaggtgtcgattatggcgagaaagacttctatgtgtttgatattctgatcaatacggaatcaggagacaacacgtacctgactgattatgaaatgcaggacttctgtaatgaatttgggtttaagatggcaccaatgcttggtcgcggcacattcgatagcctgattatgattccgaacgatttcgattcggttctcgccgcttacaatgcaacggcgagcgaggacctggtaaaagcgaacaactgcgtctttgatgccaatgtgagtggtgataacactgctgaaggctatgttcttaaaccgtgttttcccaaatggttaccgaatgggacgcgtgtggcgatcaaatgcaagaactccaaattcagcgagaagaagaaaagtgacaaaccgatcaagacacaagtcccactgacggaaattgataagaatctgctggacgtattggcctgttacgtcactttaaaccgcgtgaacaacgtgatctctaagattggaacagtgacgccgaaagattttggcaaagtaatgggtctgactgttcaggatattctggaagaaacgtcacgtgagggtattgttctgacgacatcggacaatcctaatctcgtcaagaaagaacttgttcgcatggtgcaggatgtattagaatcggcatggatcgaactggtgtcg

SEQ ID NO: 200 - protein, 343 aa, synthetic construct
  REGION 1..343: note = variant of RNA ligase 2 from Escherichia phage RB69 (Bacteriophage RB69)
MHHHHHHGGSGMFKKYSSLENHYNSKFIEKLYANGLTTGVWVAREKIHGTNFSLIIERDNVTCAKRTGPILPAEDFYGYEIVLKKYDKAIKTVQKFMYTARAVSYQVFGEFAGGGIQKGVDYGEKDFYVFDILINTESGDNTYLTDYEMQDFCNEFGFKMAPMLGRGTFDSLIMIPNDFDSVLAAYNATASEDLVKANNCVFDANVSGDNTAEGYVLKPCFPKWLPNGTRVAIKCKNSKFSEKKKSDKPIKTQVPLTEIDKNLLDVLACYVTLNRVNNVISKIGTVTPKDFGKVMGLTVQDILEETSREGIVLTTSDNPNLVKKELVRMVQDVLESAWIELVS

SEQ ID NO: 201 - DNA, 1029 bp, synthetic construct
  misc_feature 1..1029: note = variant of RNA ligase 2 from Escherichia phage RB69 (Bacteriophage RB69)
  source 1..1029: mol_type = other DNA
atgcatcaccatcaccatcacggtggcagcggtatgtttaagaaatattctagtctggaaaaccattacaatagcaaattcattgagaaactccgtaccaacggcttaactactggtgtgtgggttgcgcgcgaaaagatccacgggacgaacttttcgctgattatcacccgtgataatgtaacatgcgccaaacgtacaggcccgattaaacctgcagaagacttctacggttatgaaatcgtcctgaagaaatacgataaagcgattaagacggtgcagaaatttatgtataccgcccgcgcggtttcctaccaagtgttcggagaatttgctggcgggggtatccagaaaggtgtcgattatggcgagaaagacttctatgtgtttgatattctgatcaatacggaatcaggagacaacacgtacctgactgattatgaaatgcaggacttctgtaatgaatttgggtttaagatggcaccaatgcttggtcgcggcacattcgattcgctgattatgattccgaacgatttcgattcggttctcgccgcttacaatgcaacggcgagcgaggacctggtagaagcgaacaactgcgtctgggatgccaatgtgatcggtgataacactgctgaaggctatgttcttaaaccgtgtttccccaaatggttaccgaatgggacgcgtgtggcgatcaaatgcaagaactccaaattcagcgagaagaagaaaagtgacaaaccgatcaagacacaagtcccactgacggaaattgataagaatctgctggacgtattggcctgttacgtcactttaaaccgcgtgaacaacgtgatctctaagattggaacagtgacgccgaaagattttggcaaagtaatgggtctgactgttcaggatattctggaagaaacgtcacgtgagggtattgttctgacgacatcggacaatcctaatctcgtcaagaaagaacttcagcgcatggtgcaggatgtattacgtcccgcatggatcgaactgatctcg

SEQ ID NO: 202 - protein, 343 aa, synthetic construct
  REGION 1..343: note = variant of RNA ligase 2 from Escherichia phage RB69 (Bacteriophage RB69)
MHHHHHHGGSGMFKKYSSLENHYNSKFIEKLRTNGLTTGVWVAREKIHGTNFSLIITRDNVTCAKRTGPIKPAEDFYGYEIVLKKYDKAIKTVQKFMYTARAVSYQVFGEFAGGGIQKGVDYGEKDFYVFDILINTESGDNTYLTDYEMQDFCNEFGFKMAPMLGRGTFDSLIMIPNDFDSVLAAYNATASEDLVEANNCVWDANVIGDNTAEGYVLKPCFPKWLPNGTRVAIKCKNSKFSEKKKSDKPIKTQVPLTEIDKNLLDVLACYVTLNRVNNVISKIGTVTPKDFGKVMGLTVQDILEETSREGIVLTTSDNPNLVKKELQRMVQDVLRPAWIELIS

SEQ ID NO: 203 - DNA, 1029 bp, synthetic construct
  misc_feature 1..1029: note = variant of RNA ligase 2 from Escherichia phage RB69 (Bacteriophage RB69)
  source 1..1029: mol_type = other DNA
atgcatcaccatcaccatcacggtggcagcggtatgtttaagaaatattctagtctggaaaaccattacaatagcaaattcattgagaaactctatgctaacggcttaactactggtgtgtgggttgcgcgcgaaaagatccacgggacgaacttttcgctgattatcgagcgtgataatgtaacatgcgccaaacgtacaggcccgattttgcctgcagaagacttctacggttatgaaatcgtcctgaagaaatacgataaagcgattaagacggtgcagaaatttatgtataccgcccgcgcggtttcctaccaagtgttcggagaatttgctggcggcggtatccagaaaggtgtcgattatggcgagaaagacttctatgtgtttgatattctgatcaatacggaatcaggagacaacacgtacctgactgattatgaaatgcaggacttctgtaatgaatttgggtttaagatggcaccaatgcttggtcgcggcacattcgatagcctgattatgattccgaacgatttcgattcggttctcgccgcttacaatgcaacggcgagcgaggacctggtaaaagcgaacaactgcgtctttgatgccaatgtgatcggtgataacactgctgaaggctatgttcttaaaccgtgtgaacccaaatggttaccgaatgggacgcgtgtggcgatcaaatgcaagaactccaaattcagcgagaagaagaaaagtgacaaaccgatcaagacacaagtcccactgacggaaattgataagaatctgctggacgtattggcctgttacgtcactttaaaccgcgtgaacaacgtgatctctaagattggaacagtgacgccgaaagattttggcaaagtaatgggtctgactgttcaggatattctggaagaaacgtcacgtgagggtattgttctgacgacatcggacaatcctaacctcgtcaagaaagaacttgttcgcatggtgcaggatgtattacgctcggcatggatcgaactggtgtcg

SEQ ID NO: 204 - protein, 343 aa, synthetic construct
  REGION 1..343: note = variant of RNA ligase 2 from Escherichia phage RB69 (Bacteriophage RB69)
MHHHHHHGGSGMFKKYSSLENHYNSKFIEKLYANGLTTGVWVAREKIHGTNFSLIIERDNVTCAKRTGPILPAEDFYGYEIVLKKYDKAIKTVQKFMYTARAVSYQVFGEFAGGGIQKGVDYGEKDFYVFDILINTESGDNTYLTDYEMQDFCNEFGFKMAPMLGRGTFDSLIMIPNDFDSVLAAYNATASEDLVKANNCVFDANVIGDNTAEGYVLKPCEPKWLPNGTRVAIKCKNSKFSEKKKSDKPIKTQVPLTEIDKNLLDVLACYVTLNRVNNVISKIGTVTPKDFGKVMGLTVQDILEETSREGIVLTTSDNPNLVKKELVRMVQDVLRSAWIELVS

SEQ ID NO: 205 - DNA, 1029 bp, synthetic construct
  misc_feature 1..1029: note = variant of RNA ligase 2 from Escherichia phage RB69 (Bacteriophage RB69)
  source 1..1029: mol_type = other DNA
atgcatcaccatcaccatcacggtggcagcggtatgtttaagaaatattctagtctggaaaaccattacaatagcaaattcattgagaaactctataccaacggcttaactactggtgtgtgggttgcgcgcgaaaagatccacgggacgaacttttcgctgattatcgagcgtgataatgtaacatgcgccaaacgtacaggcccgattttgcctgcagaagacttctacggttatgaaatcgtcctgaagaaatacgataaagcgattaagacggtgcagaaatttatgtataccgccggcgcggtttcctaccaagtgttcggagaatttgctggcggcggtatccagaaaggtgtcgattatggcgagaaagacttctatgtgtttgatattctgatcaatacggaatcaggagacaacacgtacctgactgattatgaaatgcaggacttctgtaatgaatttgggtttaagatggcaccaatgcttggtcgcggcacattcgatagcctgattatgattccgaacgatttcgattcggttctcgccgcttacaatgcaacggcgagcgaggacctggtagaagcgaacaactgcgtctttgatgccaatgtgatcggtgataacactgctgaaggctatgttcttaaaccgtgtgaacccaaatggttaccgaatgggacgcgtgtggcgatcaaatgcaagaactccaaattcagcgagaagaagaaaagtgacaaaccgatcaagacacaagtcccactgacggaaattgataagaatctgctggacgtattggcctgttacgtcactttaaaccgcgtgaacaacgtgatctctaagattggaacagtgacgccgaaagattttggcaaagtaatgggtctgactgttaaggatattctggaagaaacgtcacgtgagggtattgttctgacgacatcggacaatcctgacctcgtcaagaaagaacttgttcgcatggtgcaggatgtattagaatcggcatggcgcgaactggtgtcg

SEQ ID NO: 206 - protein, 343 aa, synthetic construct
  REGION 1..343: note = variant of RNA ligase 2 from Escherichia phage RB69 (Bacteriophage RB69)
MHHHHHHGGSGMFKKYSSLENHYNSKFIEKLYTNGLTTGVWVAREKIHGTNFSLIIERDNVTCAKRTGPILPAEDFYGYEIVLKKYDKAIKTVQKFMYTAGAVSYQVFGEFAGGGIQKGVDYGEKDFYVFDILINTESGDNTYLTDYEMQDFCNEFGFKMAPMLGRGTFDSLIMIPNDFDSVLAAYNATASEDLVEANNCVFDANVIGDNTAEGYVLKPCEPKWLPNGTRVAIKCKNSKFSEKKKSDKPIKTQVPLTEIDKNLLDVLACYVTLNRVNNVISKIGTVTPKDFGKVMGLTVKDILEETSREGIVLTTSDNPDLVKKELVRMVQDVLESAWRELVS

SEQ ID NO: 207 - DNA, 1029 bp, synthetic construct
  misc_feature 1..1029: note = variant of RNA ligase 2 from Escherichia phage RB69 (Bacteriophage RB69)
  source 1..1029: mol_type = other DNA
atgcatcaccatcaccatcacggtggcagcggtatgtttaagaaatattctagtctggaaaaccattacaatagcaaattcattgagaaactctataaaaacggcttaactactggtgtgtgggttgcgcgcgaaaagatccacgggacgaacttttcgctgattatcgagcgtgataatgtaacatgcgccaaacgtacaggcccgattttgcctgcagaagacttctacggttatgaaatcgtcctgaagaaatacgataaagcgattaagacggtgcagaaatttatgtataccgcccgcgcggtttcctaccaagtgttcggagaatttgctggcggcggtatccagaaaggtgtcgattatggcgagaaagacttctatgtgtttgatattctgatcaatacggaatcaggagacaacacgtacctgactgattatgaaatgcaggacttctgtaatgaatttgggtttaagatggcaccaatgcttggtcgcggcacattcgatagcctgattatgattccgaacgatttcgattcggttctccctgcttacaatgcaacggcgagcgaggacctggtagaagcgaacaactgcgtctttgatgccaatgtgattggtgataacactgctgaaggctatgttcttaaaccgtgtttccccaaatggttaccgaatgggacgcgtgtggcgatcaaatgcaagaactccaaattcagcgagaagaagaaaagtgacaaaccgatcaagacacaagtcccactgacggaaattgataagaatctgctggacgtattggcctgttacgtcactttaaaccgcgtgaacaacgtgatctctaagattggaacagtgacgccgaaagattttggcaaagtaatgggtctgactgttcaggatattctggaagaaacgtcacgtgagggtattgttctgacgacatcggacaatcctgatctcgtcaagaaagaacttgttcgcatggtgcaggatgtattacattcggcatggatcgaactggtgtcg

SEQ ID NO: 208 - protein, 343 aa, synthetic construct
  REGION 1..343: note = variant of RNA ligase 2 from Escherichia phage RB69 (Bacteriophage RB69)
MHHHHHHGGSGMFKKYSSLENHYNSKFIEKLYKNGLTTGVWVAREKIHGTNFSLIIERDNVTCAKRTGPILPAEDFYGYEIVLKKYDKAIKTVQKFMYTARAVSYQVFGEFAGGGIQKGVDYGEKDFYVFDILINTESGDNTYLTDYEMQDFCNEFGFKMAPMLGRGTFDSLIMIPNDFDSVLPAYNATASEDLVEANNCVFDANVIGDNTAEGYVLKPCFPKWLPNGTRVAIKCKNSKFSEKKKSDKPIKTQVPLTEIDKNLLDVLACYVTLNRVNNVISKIGTVTPKDFGKVMGLTVQDILEETSREGIVLTTSDNPDLVKKELVRMVQDVLHSAWIELVS

SEQ ID NO: 209 - DNA, 1029 bp, synthetic construct
  misc_feature 1..1029: note = variant of RNA ligase 2 from Escherichia phage RB69 (Bacteriophage RB69)
  source 1..1029: mol_type = other DNA
atgcatcaccatcaccatcacggtggcagcggtatgtttaagaaatattctagtctggaaaaccattacaatagcaaattcattgagaaactctataaaaacggcttaactactggtgtgtgggttgcgcgcgaaaagatccacgggacgaacttttcgctgattatcgagcgtgataatgtaacatgcgccaaacgtacaggcccgattttgcctgcagaagacttctacggttatgaaatcgtcctgaagaaatacgataaagcgattaagacggtgcagaaatttatgtataccgccggcgcggtttcctaccaagtgttcggagaatttgctggcggcggtatccagaaaggtgtcgattatggcgagaaagacttctatgtgtttgatattctgatcaatacggaatcaggagacaacacgtacctgactgattatgaaatgcaggacttctgtaatgaatttgggtttaagatggcaccaatgcttggtcgcggcacattcgatagcctgattatgattccgaacgatttcgattcggttctcgccgcttacaatgcaacggcgagcgaggacctggtagaagcgaacaactgcgtctttgatgccaatgtgagtggtgataacactgctgaaggctatgttcttaaaccgtgtgaacccaaatggttaccgaatgggacgcgtgtggcgatcaaatgcaagaactccaaattcagcgagaagaagaaaagtgacaaaccgatcaagacacaagtcccactgacggaaattgataagaatctgctggacgtattggcctgttacgtcactttaaaccgcgtgaacaacgtgatctctaagattggaacagtgacgccgaaagattttggcaaagtaatgggtctgactgttcaggatattctggaagaaacgtcacgtgagggtattgttctgacgacatcggacaatcctaatctcgtcaagaaagaacttgttcgcatggtgcaggatgtattacgtcccgcatggatcgaactggtgtcg

SEQ ID NO: 210 - protein, 343 aa, synthetic construct
  REGION 1..343: note = variant of RNA ligase 2 from Escherichia phage RB69 (Bacteriophage RB69)
MHHHHHHGGSGMFKKYSSLENHYNSKFIEKLYKNGLTTGVWVAREKIHGTNFSLIIERDNVTCAKRTGPILPAEDFYGYEIVLKKYDKAIKTVQKFMYTAGAVSYQVFGEFAGGGIQKGVDYGEKDFYVFDILINTESGDNTYLTDYEMQDFCNEFGFKMAPMLGRGTFDSLIMIPNDFDSVLAAYNATASEDLVEANNCVFDANVSGDNTAEGYVLKPCEPKWLPNGTRVAIKCKNSKFSEKKKSDKPIKTQVPLTEIDKNLLDVLACYVTLNRVNNVISKIGTVTPKDFGKVMGLTVQDILEETSREGIVLTTSDNPNLVKKELVRMVQDVLRPAWIELVS

SEQ ID NO: 211 - DNA, 1029 bp, synthetic construct
  misc_feature 1..1029: note = variant of RNA ligase 2 from Escherichia phage RB69 (Bacteriophage RB69)
  source 1..1029: mol_type = other DNA
atgcatcaccatcaccatcacggtggcagcggtatgtttaagaaatattctagtctggaaaaccattacaatagcaaattcattgagaaactctataccaacggcttaactactggtgtgtgggttgcgcgcgaaaagatccacgggacgaacttttcgctgattatcgagcgtgataatgtaacatgcgccaaacgtacaggcccgattttgcctgcagaagacttctacggttatgaaatcgtcctgaagaaatacgataaagcgattaagacggtgcagaaatttatgtataccgccggcgcggtttcctaccaagtgttcggagaatttgctggcggcggtatccagaaaggtgtcgattatggcgagaaagacttctatgtgtttgatattctgatcaatacggaatcaggagacaacacgtacctgactgattatgaaatgcaggacttctgtaatgaatttgggtttaagatggcaccaatgcttggtcgcggcacattcgatagcctgattatgattccgaacgatttcgattcggttctccgcgcttacaatgcaacggcgagcgaggacctggtaaaagcgaacaactgcgtctttgatgccaatgtgattggtctgaacactgctgaaggctatgttcttaaaccgtgtgaacccaaatggttaccgaatgggacgcgtgtggcgatcaaatgcaagaactccaaattcagcgagaagaagaaaagtgacaaaccgatcaagacacaagtcccactgacggaaattgataagaatctgctggacgtattggcctgttacgtcactttaaaccgcgtgaacaacgtgatctctaagattggaacagtgacgccgaaagattttggcaaagtaatgggtctgactgttcaggatattctggaagaaacgtcacgtgagggtattgttctgacgacatcggacaatcctaatctcgtcaagaaagaacttgttcgcatggtgcaggatgtattacgtcccgcatggatcgaactggtgtcg

SEQ ID NO: 212 - protein, 343 aa, synthetic construct
  REGION 1..343: note = variant of RNA ligase 2 from Escherichia phage RB69 (Bacteriophage RB69)
MHHHHHHGGSGMFKKYSSLENHYNSKFIEKLYTNGLTTGVWVAREKIHGTNFSLIIERDNVTCAKRTGPILPAEDFYGYEIVLKKYDKAIKTVQKFMYTAGAVSYQVFGEFAGGGIQKGVDYGEKDFYVFDILINTESGDNTYLTDYEMQDFCNEFGFKMAPMLGRGTFDSLIMIPNDFDSVLRAYNATASEDLVKANNCVFDANVIGLNTAEGYVLKPCEPKWLPNGTRVAIKCKNSKFSEKKKSDKPIKTQVPLTEIDKNLLDVLACYVTLNRVNNVISKIGTVTPKDFGKVMGLTVQDILEETSREGIVLTTSDNPNLVKKELVRMVQDVLRPAWIELVS

SEQ ID NO: 213 - DNA, 1029 bp, synthetic construct
  misc_feature 1..1029: note = variant of RNA ligase 2 from Escherichia phage RB69 (Bacteriophage RB69)
  source 1..1029: mol_type = other DNA
atgcatcaccatcaccatcacggtggcagcggtatgtttaagaaatattctagtctggaaaaccattacaatagcaaattcattgagaaactctatgctaacggcttaactactggtgtgtgggttgcgcgcgaaaagatccacgggacgaacttttcgctgattatcgagcgtgataatgtaacatgcgccaaacgtacaggcccgattttgcctgcagaagacttctacggttatgaaatcgtcctgaagaaatacgataaagcgattaagacggtgcagaaatttatgtataccgcccgcgcggtttcctaccaagtgttcggagaatttgctggcggcggtatccagaaaggtgtcgattatggcgagaaagacttctatgtgtttgatattctgatcaatacggaatcaggagacaacacgtacctgactgattatgaaatgcaggacttctgtaatgaatttgggtttaagatggcaccaatgcttggtcgcggcacattcgatagcctgattatgattccgaacgatttcgattcggttctcgccgcttacaatgcaacggcgagcgaggacctggtagaagcgaacaactgcgtctttgatgccaatgtgagtggtctgaacactgctgaaggctatgttcttaaaccgtgtttccccaaatggttaccgaatgggacgcgtgtggcgatcaaatgcaagaactccaaattcagcgagaagaagaaaagtgacaaaccgatcaagacacaagtcccactgacggaaattgataagaatctgctggacgtattggcctgttacgtcactttaaaccgcgtgaacaacgtgatctctaagattggaacagtgacgccgaaagattttggcaaagtaatgggtctgactgttaaggatattctggaagaaacgtcacgtgagggtattgttctgacgacatcggacaatcctaatctcgtcaagaaagaacttgttcgcatggtgcaggatgtattagaatcggcatggcgcgaactggtgtcg

SEQ ID NO: 214 - protein, 343 aa, synthetic construct
  REGION 1..343: note = variant of RNA ligase 2 from Escherichia phage RB69 (Bacteriophage RB69)
MHHHHHHGGSGMFKKYSSLENHYNSKFIEKLYANGLTTGVWVAREKIHGTNFSLIIERDNVTCAKRTGPILPAEDFYGYEIVLKKYDKAIKTVQKFMYTARAVSYQVFGEFAGGGIQKGVDYGEKDFYVFDILINTESGDNTYLTDYEMQDFCNEFGFKMAPMLGRGTFDSLIMIPNDFDSVLAAYNATASEDLVEANNCVFDANVSGLNTAEGYVLKPCFPKWLPNGTRVAIKCKNSKFSEKKKSDKPIKTQVPLTEIDKNLLDVLACYVTLNRVNNVISKIGTVTPKDFGKVMGLTVKDILEETSREGIVLTTSDNPNLVKKELVRMVQDVLESAWRELVS

SEQ ID NO: 215 - DNA, 1029 bp, synthetic construct
  misc_feature 1..1029: note = variant of RNA ligase 2 from Escherichia phage RB69 (Bacteriophage RB69)
  source 1..1029: mol_type = other DNA
atgcatcaccatcaccatcacggtggcagcggtatgtttaagaaatattctagtctggaaaaccattacaatagcaaattcattgagaaactctataaaaacggcttaactactggtgtgtgggttgcgcgcgaaaagatccacgggacgaacttttcgctgattatcgagcgtgataatgtaacatgcgccaaacgtacaggcccgattttgcctgcagaagacttctacggttatgaaatcgtcccgaagaaatacgataaagcgattaagacggtgcagaaatttatgtataccgcccgcgcggtttcctaccaagtgttcggagaatttgctggcggcggtatccagaaaggtgtcgattatggcgagaaagacttctatgtgtttgatattctgatcaatacggaatcaggagacaacacgtacctgactgattatgaaatgcaggacttctgtaatgaatttgggtttaagatggcaccaatgcttggtcgcggcacattcgatagcctgattatgattccgaacgatttcgattcggttctccctgcttacaatgcaacggcgagcgaggacctggtaaaagcgaacaactgcgtctttgatgccaatgtgatcggtgataacactgctgaaggctatgttcttaaaccgtgttttcccaaatggttaccgaatgggacgcgtgtggcgatcaaatgcaagaactccaaattcagcgagaagaagaaaagtgacaaaccgatcaagacacaagtcccactgacggaaattgataagaatctgctggacgtattggcctgttacgtcactttaaaccgcgtgaacaacgtgatctctaagattggaacagtgacgccgaaagattttggcaaagtaatgggtctgactgttaaggatattctggaagaaacgtcacgtgagggtattgttctgacgacatcggacaatcctaacctcgtcaagaaagaacttgttcgcatggtgcaggatgtattacgctcggcatggatcgaactggtgtcg

SEQ ID NO: 216 - protein, 343 aa, synthetic construct
  REGION 1..343: note = variant of RNA ligase 2 from Escherichia phage RB69 (Bacteriophage RB69)
MHHHHHHGGSGMFKKYSSLENHYNSKFIEKLYKNGLTTGVWVAREKIHGTNFSLIIERDNVTCAKRTGPILPAEDFYGYEIVPKKYDKAIKTVQKFMYTARAVSYQVFGEFAGGGIQKGVDYGEKDFYVFDILINTESGDNTYLTDYEMQDFCNEFGFKMAPMLGRGTFDSLIMIPNDFDSVLPAYNATASEDLVKANNCVFDANVIGDNTAEGYVLKPCFPKWLPNGTRVAIKCKNSKFSEKKKSDKPIKTQVPLTEIDKNLLDVLACYVTLNRVNNVISKIGTVTPKDFGKVMGLTVKDILEETSREGIVLTTSDNPNLVKKELVRMVQDVLRSAWIELVS

SEQ ID NO: 217 - DNA, 1029 bp, synthetic construct
  misc_feature 1..1029: note = variant of RNA ligase 2 from Escherichia phage RB69 (Bacteriophage RB69)
  source 1..1029: mol_type = other DNA
atgcatcaccatcaccatcacggtggcagcggtatgtttaagaaatattctagtctggaaaaccattacaatagcaaattcattgagaaactctatgctaacggcttaactgatggtgtatgggttgcgcgcgaaaagatccacgggacgaacttttcgctgattatcgagcgtgataatgtaacatgcgccaaacgtacaggcccgattaagcctgcagaagacttctacggttatgaaatcgtcctgaagaaatacgataaagcgattaagacggtgcagaaatttatgtataccgccggcgcggtttcctaccaagtgttcggagaatttgctggcaacggtatccagaaaggtgtcgattatggcgagaaagacttctatgtgtttgatattctgatcaatacggaatcaggagacaacacgtacctgactgattatgaaatgcaggacttctgtaatgaatttgggtttaagatggcaccaatgcttggtcgcggcacattcgatagcctgattatgattccgaacgatttcgattcggttctcatggcttacaatgcaacggcgaaagaggacctggtaaaagcgaacaactgcgtctttgatgccaatgtgatcggtgataacactgctgaaggctatgttcttaaaccgtgtgaacccaaatggttaccgaatgggacgcgtgtggcgatcaaatgcaagaactccaaattcagcgagaagaagaaaagtgacaaaccgatcaagacacaagtcccactgacggaaattgataagaatctgctggacgtattggcctgttacgtcactttaaaccgcgtgaacaacgtgatctctaagattggaacagtgacgccgaaagattttggcaaagtaatgggtctgactgttcaggatattctggaagaaacgtcacgtgagggtattgttctgacgacatcggacaatcctgacctcgtcaagaaagaacttgttcgcatggtgcaggatgtattagaatcggcatggcgcgaactggtgtcg

SEQ ID NO: 218 - protein, 343 aa, synthetic construct
  REGION 1..343: note = variant of RNA ligase 2 from Escherichia phage RB69 (Bacteriophage RB69)
MHHHHHHGGSGMFKKYSSLENHYNSKFIEKLYANGLTDGVWVAREKIHGTNFSLIIERDNVTCAKRTGPIKPAEDFYGYEIVLKKYDKAIKTVQKFMYTAGAVSYQVFGEFAGNGIQKGVDYGEKDFYVFDILINTESGDNTYLTDYEMQDFCNEFGFKMAPMLGRGTFDSLIMIPNDFDSVLMAYNATAKEDLVKANNCVFDANVIGDNTAEGYVLKPCEPKWLPNGTRVAIKCKNSKFSEKKKSDKPIKTQVPLTEIDKNLLDVLACYVTLNRVNNVISKIGTVTPKDFGKVMGLTVQDILEETSREGIVLTTSDNPDLVKKELVRMVQDVLESAWRELVS

SEQ ID NO: 219 - DNA, 1029 bp, synthetic construct
  misc_feature 1..1029: note = variant of RNA ligase 2 from Escherichia phage RB69 (Bacteriophage RB69)
  source 1..1029: mol_type = other DNA
atgcatcaccatcaccatcacggtggcagcggtatgtttaagaaatattctagtctggaaaaccattacaatagcaaattcattgagaaactctacgctaacggcttaactactggtgtgtgggttgcgcgcgaaaagatccacgggacgaacttttcgctgattatcgaacgtgataacgtaacatgcgccaaacgtacaggcccgattttgcctgcagaagacttctacggttatgaaatcgtcctgaagaaatacgataaagcgattaagacggtgcagaaatttatgtataccgccggcgcggtttcctaccaagtgttcggagaatttgctggcggcggtatccagaaaggtgtcgattatggcgagaaagacttctatgtgtttgatattctgatcaatacggaatcaggagacgccacgtacctgactgattatgaaatgcaggacttctgtaatgaatttgggtttaagatggcaccaatgcttggtcgcggcacattcgaagagctgattcagattccgaacgatttcgattcggttctcgctgcttacaatgcaacggcgagcgaggacctggtagaagcgaacaactgcgtctttgatgccaatgtgatcggtgataacactgctgaaggctatgttcttaaaccgtgtgaacccaaatggttaccgaatgggacgcgtgtggcgatcaaatgcaagaactccaaattcagcgagaagaagaaaagtgacaaaccgatcaagacacaagtcccactgacggaaattgataagaatctgctggacgtattggcctgttacgtcactttaaaccgcgtgaacaacgtgatctctaagattggaacagtgacgccgaaagattttggcaaagtaatgggtctgactgttcaggatattctggaagaaacgtcacgtgagggtattgttctgacgacatcggacaatcctgacctcgtcaagaaagaacttgttcgcatggtgcaggatgtattagaatcggcatggcgcgaactggtgtcg

SEQ ID NO: 220 - protein, 343 aa, synthetic construct
  REGION 1..343: note = variant of RNA ligase 2 from Escherichia phage RB69 (Bacteriophage RB69)
MHHHHHHGGSGMFKKYSSLENHYNSKFIEKLYANGLTTGVWVAREKIHGTNFSLIIERDNVTCAKRTGPILPAEDFYGYEIVLKKYDKAIKTVQKFMYTAGAVSYQVFGEFAGGGIQKGVDYGEKDFYVFDILINTESGDATYLTDYEMQDFCNEFGFKMAPMLGRGTFEELIQIPNDFDSVLAAYNATASEDLVEANNCVFDANVIGDNTAEGYVLKPCEPKWLPNGTRVAIKCKNSKFSEKKKSDKPIKTQVPLTEIDKNLLDVLACYVTLNRVNNVISKIGTVTPKDFGKVMGLTVQDILEETSREGIVLTTSDNPDLVKKELVRMVQDVLESAWRELVS

SEQ ID NO: 221 - DNA, 1032 bp, synthetic construct
  misc_feature 1..1032: note = wild type RNA ligase 2 from Aeromonas phage CC2
  source 1..1032: mol_type = other DNA
atgcatcaccatcaccatcacggtggcagcggtatgatctttgtgaaatataattctctggaaaaccattaccgtcagaacgtcattgattcgttcaccaccagcggctatactgcgaaaggtgttgagtgggtagccatggaaaagattcacgggacgaactttcaacttgcagtgaatgacgaacatgttcaggctggccgccgcacggatctgatcggtgacttcgatcagttctacgaggcggatctcatcgtgaagaaatatcacgacaacgcccgtaaagtctacgattttgtcaaacagaaacatccggaagtggatcaagtgaccatttttggcgaatatgcgggaaatttaaccacaggtaagatgattcagaaagaagtagagtatggcgaccaagatttctacgtgtttgacatctttattttcagtggtgaaacggggatgtatctgtcccacgattttgttatggaatcaattcgcggcatcttcaaacatgcaccagttatttaccgtggcgattttgatggtgtcaccaaattgccgaatgacttccagagcgtagtgatccctaacaacaaagagggaaaatttggtctggttgttggcactgacaatattgctgaagggtttgtggcgaagacagtagatccgcattatacgcgccaaggtcgtaccatcttcaaaagcaagaactcgaaatttaccgagaaaggcaaatccgataaacccgtgaaagtcaaagaaccgctgggcgaatctgatttagccatggtccacgaaatcgcagagtacattaatgttaaccgcctgaagaatgtgctgagcaagattggtatcccaacgacgaaagaattcggaaaagtgtcaggcaacctcagtaaagacgcgattgaagacttcaccaaggataccaacaagaatttgcgtgatgccgaacgtccgtcggatgttggtaaagctgtcaataatcttgcgggcgagctggtacgcgagcattggatgaacattctggatgggaacttc

SEQ ID NO: 222 - protein, 344 aa, synthetic construct
  REGION 1..344: note = wild type RNA ligase 2 from Aeromonas phage CC2
MHHHHHHGGSGMIFVKYNSLENHYRQNVIDSFTTSGYTAKGVEWVAMEKIHGTNFQLAVNDEHVQAGRRTDLIGDFDQFYEADLIVKKYHDNARKVYDFVKQKHPEVDQVTIFGEYAGNLTTGKMIQKEVEYGDQDFYVFDIFIFSGETGMYLSHDFVMESIRGIFKHAPVIYRGDFDGVTKLPNDFQSVVIPNNKEGKFGLVVGTDNIAEGFVAKTVDPHYTRQGRTIFKSKNSKFTEKGKSDKPVKVKEPLGESDLAMVHEIAEYINVNRLKNVLSKIGIPTTKEFGKVSGNLSKDAIEDFTKDTNKNLRDAERPSDVGKAVNNLAGELVREHWMNILDGNF

SEQ ID NO: 223 - DNA, 1029 bp, synthetic construct
  misc_feature 1..1029: note = variant of RNA ligase 2 from Escherichia phage RB69 (Bacteriophage RB69)
  source 1..1029: mol_type = other DNA
atgcatcaccatcaccatcacggtggcagcggtatgtttaagaaatattctagtctggaaaaccattacaatagcaaattcattgagaaactctatgctaacggcttaactactggtgtgtgggttgcgcgcgaaaagatccacgggacgaacttttcgctgattatcgagcgtgataatgtaacatgcgccaaacgtacaggcccgattttgcctgcagaagacttctacggttatgaaatcgtcctgaagaaatacgataaagcgattaagacggtgcagaaatttatgtataccgccggcgcggtttcctaccaagtgttcggagaatttgctggccgcggtatccagaaaggtgtcgattatggcgagaaagacttctatgtgtttgatattctgatcaatacggaatcaggagacaacacgtacctgactgattatgaaatgcaggacttctgtaatgaatttgggtttaagatggcaccaatgcttggtcgcggcacattcgatagcctgattatgattccgaacgatttcgattcggttctcgctgcttacaatgcaacggcgagcgaggacctggtagaagcgaacaactgcgtctttgatgccaatgtgatcggtgataacactgctgaaggctatgttcttaaaccgtgtgaacccaaatggttaccgaatgggacgcgtgtggcgatcaaatgcaagaactccaaattcagcgagaagaagaaaagtgacaaaccgatcaagacacaagtcccactgacggaaattgataagaatctgctggacgtattggcctgttacgtcactttaaaccgcgtgaacaacgtgatctctaagattggaacagtgacgccgaaagattttggcaaagtaatgggtctgactgttcaggatattctggaagaaacgtcacgtgagggtattgttctgacgacatcggacaatcctgacctcgtcaagaaagaacttgttcgcatggtgcaggatgtattagaatcggcatggcgcgaactggtgtcg

SEQ ID NO: 224 - protein, 343 aa, synthetic construct
  REGION 1..343: note = variant of RNA ligase 2 from Escherichia phage RB69 (Bacteriophage RB69)
MHHHHHHGGSGMFKKYSSLENHYNSKFIEKLYANGLTTGVWVAREKIHGTNFSLIIERDNVTCAKRTGPILPAEDFYGYEIVLKKYDKAIKTVQKFMYTAGAVSYQVFGEFAGRGIQKGVDYGEKDFYVFDILINTESGDNTYLTDYEMQDFCNEFGFKMAPMLGRGTFDSLIMIPNDFDSVLAAYNATASEDLVEANNCVFDANVIGDNTAEGYVLKPCEPKWLPNGTRVAIKCKNSKFSEKKKSDKPIKTQVPLTEIDKNLLDVLACYVTLNRVNNVISKIGTVTPKDFGKVMGLTVQDILEETSREGIVLTTSDNPDLVKKELVRMVQDVLESAWRELVS

SEQ ID NO: 225 - DNA, 1029 bp, synthetic construct
  misc_feature 1..1029: note = variant of RNA ligase 2 from Escherichia phage RB69 (Bacteriophage RB69)
  source 1..1029: mol_type = other DNA
atgcatcaccatcaccatcacggtggcagcggtatgtttaagaaatattctagtctggaaaaccattacaatagcaaattcattgagaaactctatgctaacggcttaactactggtgtgtgggttgcgcgcgaaaagatccacgggacgaacttttcgctgattatcacgcgtgatcgcgtaacatgcgccaaacgtacaggcccgattttgcctgcagaagacttctacggttatgaaatcgtcctgaagaaatacgataaagcgattaagacggtgcagaaatttatgtataccgccggcgcggtttcctaccaagtgttcggagaatttgctggcggcggtatccagaaaggtgtcgattatggcgagaaagacttctatgtgtttgatattctgatcaatacggaatcaggagacaacacgtacctgactgattatgaaatgcaggacttctgtaatgaatttgggtttaagatggcaccaatgcttggtcgcggcacattcgaagagctgattcagattccgaacgatttcgattcggttctcgctgcttacaatgcaacggcgtcggtggacctggtaaaagcgaacaactgcgtctttgatgccaatgtgattggtgataacactgctgaaggctatgttcttaaaccgtgtgaacccaaatggttaccgaatgggacgcgtgtggcgatcaaatgcaagaactccaaattcagcgagaagaagaaaagtgacaaaccgatcaagacacaagtcccactgacggaaattgataagaatctgctggacgtattggcctgttacgtcactttaaaccgcgtgaacaacgtgatctctaagattggaacagtgacgccgaaagattttggcaaagtaatgggtctgactgttcaggatattctggaagaaacgtcacgtgagggtattgttctgacgacatcggacaatcctaagctcgtcaagaaagaacttgttcgcatggtgcaggatgtattagaatcggcatggcgcgaactggtgtcg

SEQ ID NO: 226 - protein, 343 aa, synthetic construct
  REGION 1..343: note = variant of RNA ligase 2 from Escherichia phage RB69 (Bacteriophage RB69)
MHHHHHHGGSGMFKKYSSLENHYNSKFIEKLYANGLTTGVWVAREKIHGTNFSLIITRDRVTCAKRTGPILPAEDFYGYEIVLKKYDKAIKTVQKFMYTAGAVSYQVFGEFAGGGIQKGVDYGEKDFYVFDILINTESGDNTYLTDYEMQDFCNEFGFKMAPMLGRGTFEELIQIPNDFDSVLAAYNATASVDLVKANNCVFDANVIGDNTAEGYVLKPCEPKWLPNGTRVAIKCKNSKFSEKKKSDKPIKTQVPLTEIDKNLLDVLACYVTLNRVNNVISKIGTVTPKDFGKVMGLTVQDILEETSREGIVLTTSDNPKLVKKELVRMVQDVLESAWRELVS

SEQ ID NO: 227 - DNA, 1029 bp, synthetic construct
  misc_feature 1..1029: note = variant of RNA ligase 2 from Escherichia phage RB69 (Bacteriophage RB69)
  source 1..1029: mol_type = other DNA
atgcatcaccatcaccatcacggtggcagcggtatgtttaagaaatattctagtctggaaaaccattacaatagcaaattcattgagaaactctatgctaacggcttaactactggtgtgtgggttgcgcgcgaaaagatccacgggacgaacttttcgctgattatcgaacgtgatcgcgtaacatgcgccaaacgtacaggcccgattttgcctgcagaagacttctacggttatgaaatcgtcctgaagaaatacgataaagcgattaaggcggtgcagaaatttatgtataccgccggcgcggtttcctaccaagtgttcggagaatttgctggcggcggtatccagaaaggtgtcgattatggcgagaaagacttctatgtgtttgatattctgatcaatacggaatcaggagacaatacgtacctgactgattatgaaatgcaggacttctgtaatgaatttgggtttaagatggcaccaatgcttggtcgcggcacattcgaagagctgattatgattccgaacgatttcgattcggttctcgctgcttacaatgcaacggcgagcgaggacctggtagaagcgaacaactgcgtctttgatgccaatgtgatcggtgataacactgctgaaggctatgttcttaaaccgtgtgaacccaaatggttaccgaatgggacgcgtgtggcgatcaaatgcaagaactccaaattcagcgagaagaagaaaagtgacaaaccgatcaagacacaagtcccactgacggaaattgataagaatctgctggacgtattggcctgttacgtcactttaaaccgcgtgaacaacgtgatctctaagattggaacagtgacgccgaaagattttggcaaagtaatgggtctgactgttcaggatattctggaagaaacgtcacgtgagggtattgttctgacgacatcggacaatcctgacctcgtcaagaaagaacttgttcgcatggtgcaggatgtattagaatcggcatggcgcgaactggtgtcg

SEQ ID NO: 228 - protein, 343 aa, synthetic construct
  REGION 1..343: note = variant of RNA ligase 2 from Escherichia phage RB69 (Bacteriophage RB69)
MHHHHHHGGSGMFKKYSSLENHYNSKFIEKLYANGLTTGVWVAREKIHGTNFSLIIERDRVTCAKRTGPILPAEDFYGYEIVLKKYDKAIKAVQKFMYTAGAVSYQVFGEFAGGGIQKGVDYGEKDFYVFDILINTESGDNTYLTDYEMQDFCNEFGFKMAPMLGRGTFEELIMIPNDFDSVLAAYNATASEDLVEANNCVFDANVIGDNTAEGYVLKPCEPKWLPNGTRVAIKCKNSKFSEKKKSDKPIKTQVPLTEIDKNLLDVLACYVTLNRVNNVISKIGTVTPKDFGKVMGLTVQDILEETSREGIVLTTSDNPDLVKKELVRMVQDVLESAWRELVS

SEQ ID NO: 229 - DNA, 1029 bp, synthetic construct
  misc_feature 1..1029: note = variant of RNA ligase 2 from Escherichia phage RB69 (Bacteriophage RB69)
  source 1..1029: mol_type = other DNA
atgcatcaccatcaccatcacggtggcagcggtatgtttaagaaatattctagtctggaaaaccattacaatagcaaattcattgagaaactctatgctaacggcttaactactggtgtgtgggttgcgcgcgaaaagatccacgggacgaacttttcgctgattatcgagcgtgataatgtaacatgcgccaaacgtacaggcccgattttgcctgcagaagacttctacggttatgaaatcgtcctgaagaaatacgataaagcgattaagacggtgcagaaatttatgtataccgccggcgcggtttcctaccaagtgttcggagaatttgctggcggcggtatccagaaaggtgtcgattatggcgagaaagacttctatgtgtttgatattctgatcaatacggaatcaggagacgccacgtacctgactgattatgaaatgcaggacttctgtaatgaatttgggtttaagatggcaccaatgcttggtcgcggcacattcgacagtctgattcagattccgaacgatttcgattcggttctcgctgcttacaatgcaacggcgtcggaggacctggtaaaagcgaacaactgcgtctttgatgccaatgtgatcggtgataacactgctgaaggctatgttcttaaaccgtgtgaacccaaatggttaccgaatgggacgcgtgtggcgatcaaatgcaagaactccaaattcagcgagaagaagaaaagtgacaaaccgatcaagacacaagtcccactgacggaaattgataagaatctgctggacgtattggcctgttacgtcactttaaaccgcgtgaacaacgtgatctctaagattggaacagtgacgccgaaagattttggcaaagtaatgggtctgactgttcaggatattctggaagaaacgtcacgtgagggtattgttctgacgacatcggacaatcctgatctcgtcaagaaagaacttgttcgcatggtgcaggatgtattagaatcggcatggcgcgaactggtgtcg

SEQ ID NO: 230 - protein, 343 aa, synthetic construct
  REGION 1..343: note = variant of RNA ligase 2 from Escherichia phage RB69 (Bacteriophage RB69)
MHHHHHHGGSGMFKKYSSLENHYNSKFIEKLYANGLTTGVWVAREKIHGTNFSLIIERDNVTCAKRTGPILPAEDFYGYEIVLKKYDKAIKTVQKFMYTAGAVSYQVFGEFAGGGIQKGVDYGEKDFYVFDILINTESGDATYLTDYEMQDFCNEFGFKMAPMLGRGTFDSLIQIPNDFDSVLAAYNATASEDLVKANNCVFDANVIGDNTAEGYVLKPCEPKWLPNGTRVAIKCKNSKFSEKKKSDKPIKTQVPLTEIDKNLLDVLACYVTLNRVNNVISKIGTVTPKDFGKVMGLTVQDILEETSREGIVLTTSDNPDLVKKELVRMVQDVLESAWRELVS

SEQ ID NO: 231 - DNA, 1029 bp, synthetic construct
  misc_feature 1..1029: note = variant of RNA ligase 2 from Escherichia phage RB69 (Bacteriophage RB69)
  source 1..1029: mol_type = other DNA
atgcatcaccatcaccatcacggtggcagcggtatgtttaagaaatattctagtctggaaaaccattacaatagcaaattcattgagaaactctatgctaacggcttaactactggtgtgtgggttgcgcgcgaaaagatccacgggacgaacttttcgctgattatcacgcgtgataacgtaacatgcgccaaacgtacaggcccgattttgcctgcagaagacttctacggttatgaaatcgtcctgaagaaatacgataaagcgattaagacggtgcagaaatttatgtataccgccggcgcggtttcctaccaagtgttcggagaatttgctggcggcggtatccagaaaggtgtcgattatggcgagaaagacttctatgtgtttgatattctgatcaatacggaatcaggagacaatacgtacctgactgattatgaaatgcaggacttctgtaatgaatttgggtttaagatggcaccaatgcttggtcgcggcacattcgaagagctgattcagattccgaacgatttcgattcggttctcgcagcttacaatgcaacggcgagcgaggacctggtagaagcgaacaactgcgtctttgatgccaatgtgattggtgataacactgctgaaggctatgttcttaaaccgtgtgaacccaaatggttaccgaatgggacgcgtgtggcgatcaaatgcaagaactccaaattcagcgagaagaagaaaagtgacaaaccgatcaagacacaagtcccactgacggaaattgataagaatctgctggacgtattggcctgttacgtcactttaaaccgcgtgaacaacgtgatctctaagattggaacagtgacgccgaaagattttggcaaagtaatgggtctgactgttcaggatattctggaagaaacgtcacgtgagggtattgttctgacgacatcggacaatcctgatctcgtcaagaaagaacttgttcgcatggtgcaggatgtattagaatcggcatggcgcgaactggtgtcg

SEQ ID NO: 232 - protein, 343 aa, synthetic construct
  REGION 1..343: note = variant of RNA ligase 2 from Escherichia phage RB69 (Bacteriophage RB69)
MHHHHHHGGSGMFKKYSSLENHYNSKFIEKLYANGLTTGVWVAREKIHGTNFSLIITRDNVTCAKRTGPILPAEDFYGYEIVLKKYDKAIKTVQKFMYTAGAVSYQVFGEFAGGGIQKGVDYGEKDFYVFDILINTESGDNTYLTDYEMQDFCNEFGFKMAPMLGRGTFEELIQIPNDFDSVLAAYNATASEDLVEANNCVFDANVIGDNTAEGYVLKPCEPKWLPNGTRVAIKCKNSKFSEKKKSDKPIKTQVPLTEIDKNLLDVLACYVTLNRVNNVISKIGTVTPKDFGKVMGLTVQDILEETSREGIVLTTSDNPDLVKKELVRMVQDVLESAWRELVS

SEQ ID NO: 233 - DNA, 1029 bp, synthetic construct
  misc_feature 1..1029: note = variant of RNA ligase 2 from Escherichia phage RB69 (Bacteriophage RB69)
  source 1..1029: mol_type = other DNA
atgcatcaccatcaccatcacggtggcagcggtatgtttaagaaatattctagtctggaaaaccattacaatagcaaattcattgagaaactctatgctaacggcttaactactggtgtgtgggttgcgcgcgaaaagatccacgggacgaacttttcgctgattatcgaacgtgataacgtaacatgcgccaaacgtacaggcccgattttgcctgcagaagacttctacggttatgaaatcgtcctgaagaaatacgataaagcgattaagacggtgcagaaatttatgtataccgccggcgcggtttcctaccaagtgttcggagaatttgctggcggcggtatccagaaaggtgtcgattatggcgagaaagacttctatgtgtttgatattctgatcaatacggaatcaggagacaccacgtacctgactgattatgaaatgcaggacttctgtaatgaatttgggtttaagatggcaccaatgcttggtcgcggcacattcgacagtctgattatgattccgaacgatttcgattcggttctcccagcttacaatgcaacggcgagcgaggacctggtagaagcgaacaactgcgtctttgatgccaatgtgatcggtgataacactgctgaaggctatgttcttaaaccgtgtgaacccaaatggttaccgaatgggacgcgtgtggcgatcaaatgcaagaactccaaattcagcgagaagaagaaaagtgacaaaccgatcaagacacaagtcccactgacggaaattgataagaatctgctggacgtattggcctgttacgtcactttaaaccgcgtgaacaacgtgatctctaagattggaacagtgacgccgaaagattttggcaaagtaatgggtctgactgttcaggatattctggaagaaacgtcacgtgagggtattgttctgacgacatcggacaatcctgatctcgtcaagaaagaacttgttcgcatggtgcaggatgtattagaatcggcatggcgcgaactggtgtcg

SEQ ID NO: 234 - protein, 343 aa, synthetic construct
  REGION 1..343: note = variant of RNA ligase 2 from Escherichia phage RB69 (Bacteriophage RB69)
MHHHHHHGGSGMFKKYSSLENHYNSKFIEKLYANGLTTGVWVAREKIHGTNFSLIIERDNVTCAKRTGPILPAEDFYGYEIVLKKYDKAIKTVQKFMYTAGAVSYQVFGEFAGGGIQKGVDYGEKDFYVFDILINTESGDTTYLTDYEMQDFCNEFGFKMAPMLGRGTFDSLIMIPNDFDSVLPAYNATASEDLVEANNCVFDANVIGDNTAEGYVLKPCEPKWLPNGTRVAIKCKNSKFSEKKKSDKPIKTQVPLTEIDKNLLDVLACYVTLNRVNNVISKIGTVTPKDFGKVMGLTVQDILEETSREGIVLTTSDNPDLVKKELVRMVQDVLESAWRELVS

SEQ ID NO: 235 - DNA, 1029 bp, synthetic construct
  misc_feature 1..1029: note = variant of RNA ligase 2 from Escherichia phage RB69 (Bacteriophage RB69)
  source 1..1029: mol_type = other DNA
atgcatcaccatcaccatcacggtggcagcggtatgtttaagaaatattctagtctggaaaaccattacaatagcaaattcattgagaaactctatgctaacggcttaactactggtgtgtgggttgcgcgcgaaaagatccacgggacgaacttttcgctgattatcacgcgtgatcgcgtaacatgcgccaaacgtacaggcccgattttgcctgcagaagacttctacggttatgaaatcgtcctgaagaaatacgataaagcgattaagacggtgcagaaatttatgtataccgccggcgcggtttcctaccaagtgttcggagaatttgctggcggcggtatccagaaaggtgtcgattatggcgagaaagacttctatgtgtttgatattctgatcaatacggaatcaggagacgccacgtacctgactgattatgaaatgcaggacttctgtaatgaatttgggtttaagatggcaccaatgcttggtcgcggcacattcgaagagctgattcagattccgaacgatttcgattcggttctcgcagcttacaatgcaacggcgtcggtggacctggtagaagcgaacaactgcgtctttgatgccaatgtgattggtgataacactgctgaaggctatgttcttaaaccgtgtgaacccaaatggttaccgaatgggacgcgtgtggcgatcaaatgcaagaactccaaattcagcgagaagaagaaaagtgacaaaccgatcaagacacaagtcccactgacggaaattgataagaatctgctggacgtattggcctgttacgtcactttaaaccgcgtgaacaacgtgatctctaagattggaacagtgacgccgaaagattttggcaaagtaatgggtctgactgttcaggatattctggaagaaacgtcacgtgagggtattgttctgacgacatcggacaatcctgacctcgtcaagaaagaacttgttcgcatggtgcaggatgtattagaatcggcatggcgcgaactggtgtcg

SEQ ID NO: 236 - protein, 343 aa, synthetic construct
  REGION 1..343: note = variant of RNA ligase 2 from Escherichia phage RB69 (Bacteriophage RB69)
MHHHHHHGGSGMFKKYSSLENHYNSKFIEKLYANGLTTGVWVAREKIHGTNFSLIITRDRVTCAKRTGPILPAEDFYGYEIVLKKYDKAIKTVQKFMYTAGAVSYQVFGEFAGGGIQKGVDYGEKDFYVFDILINTESGDATYLTDYEMQDFCNEFGFKMAPMLGRGTFEELIQIPNDFDSVLAAYNATASVDLVEANNCVFDANVIGDNTAEGYVLKPCEPKWLPNGTRVAIKCKNSKFSEKKKSDKPIKTQVPLTEIDKNLLDVLACYVTLNRVNNVISKIGTVTPKDFGKVMGLTVQDILEETSREGIVLTTSDNPDLVKKELVRMVQDVLESAWRELVS

SEQ ID NO: 237 - DNA, 1029 bp, synthetic construct
  misc_feature 1..1029: note = variant of RNA ligase 2 from Escherichia phage RB69 (Bacteriophage RB69)
  source 1..1029: mol_type = other DNA
atgcatcaccatcaccatcacggtggcagcggtatgtttaagaaatattctagtctggaaaaccattacaatagcaaattcattgagaaactctacgctaacggcttaactactggtgtgtgggttgcgcgcgaaaagatccacgggacgaacttttcgctgattatcgaacgtgatcgcgtaacatgcgccaaacgtacaggcccgattttgcctgcagaagacttctacggttatgaaatcgtcctgaagaaatacgataaagcgattaagacggtgcagaaatttatgtataccgccggcgcggtttcctaccaagtgttcggagaatttgctggcggcggtatccagaaaggtgtcgattatggcgagaaagacttctatgtgtttgatattctgatcaatacggaatcaggagacaatacgtacctgactgattatgaaatgcaggacttctgtaatgaatttgggtttaagatggcaccaatgcttggtcgcggcacattcgaaagtctgattcagattccgaacgatttcgattcggttctcgctgcttacaatgcaacggcgagcgaggacctggtagaagcgaacaactgcgtctttgatgccaatgtgatcggtgataacactgctgaaggctatgttcttaaaccgtgtgaacccaaatggttaccgaatgggacgcgtgtggcgatcaaatgcaagaactccaaattcagcgagaagaagaaaagtgacaaaccgatcaagacacaagtcccactgacggaaattgataagaatctgctggacgtattggcctgttacgtcactttaaaccgcgtgaacaacgtgatctctaagattggaacagtgacgccgaaagattttggcaaagtaatgggtctgactgttcaggatattctggaagaaacgtcacgtgagggtattgttctgacgacatcggacaatcctgatctcgtcaagaaagaacttgttcgcatggtgcaggatgtattagaatcggcatggcgcgaactggtgtcg

SEQ ID NO: 238 - protein, 343 aa, synthetic construct
  REGION 1..343: note = variant of RNA ligase 2 from Escherichia phage RB69 (Bacteriophage RB69)
MHHHHHHGGSGMFKKYSSLENHYNSKFIEKLYANGLTTGVWVAREKIHGTNFSLIIERDRVTCAKRTGPILPAEDFYGYEIVLKKYDKAIKTVQKFMYTAGAVSYQVFGEFAGGGIQKGVDYGEKDFYVFDILINTESGDNTYLTDYEMQDFCNEFGFKMAPMLGRGTFESLIQIPNDFDSVLAAYNATASEDLVEANNCVFDANVIGDNTAEGYVLKPCEPKWLPNGTRVAIKCKNSKFSEKKKSDKPIKTQVPLTEIDKNLLDVLACYVTLNRVNNVISKIGTVTPKDFGKVMGLTVQDILEETSREGIVLTTSDNPDLVKKELVRMVQDVLESAWRELVS

SEQ ID NO: 239 - DNA, 1029 bp, synthetic construct
  misc_feature 1..1029: note = variant of RNA ligase 2 from Escherichia phage RB69 (Bacteriophage RB69)
  source 1..1029: mol_type = other DNA
atgcatcaccatcaccatcacggtggcagcggtatgtttaagaaatattctagtctggaaaaccattacaatagcaaattcattgagaaactctatgctaacggcttaactactggtgtgtgggttgcgcgcgaaaagatccacgggacgaacttttcgctgattatcgagcgtgataatgtaacatgcgccaaacgtacaggcccgattttgcctgcagaagacttctacggttatgaaatcgtcctgaagaaatacgataaagcgattaagacggtgcagaaatttatgtataccgccggcgcggtttcctaccaagtgttcggagaatttgctggcggcggtatccagaaaggtgtcgattatggcgagaaagacttctatgtgtttgatattctgatcaatacggaatcaggagactgcacgtacctgactgattatgaaatgcaggacttctgtaatgaatttgggtttaagatggcaccaatgcttggtcgcggcacattcgaagagctgattatgattccgaacgatttcgattcggttctcgctgcttacaatgcaacggcgagcgaggacctggtagaagcgaacaactgcgtctttgatgccaatgtgatcggtgataacactgctgaaggctatgttcttaaaccgtgtgaacccaaatggttaccgaatgggacgcgtgtggcgatcaaatgcaagaactccaaattcagcgagaagaagaaaagtgacaaaccgatcaagacacaagtcccactgacggaaattgataagaatctgctggacgtattggcctgttacgtcactttaaaccgcgtgaacaacgtgatctctaagattggaacagtgacgccgaaagattttggcaaagtaatgggtctgactgttcaggatattctggaagaaacgtcacgtgagggtattgttctgacgacatcggacaatcctgacctcgtcaagaaagaacttgttcgcatggtgcaggatgtattagaatcggcatggcgcgaactggtgtcg

SEQ ID NO: 240 - protein, 343 aa, synthetic construct
  REGION 1..343: note = variant of RNA ligase 2 from Escherichia phage RB69 (Bacteriophage RB69)
MHHHHHHGGSGMFKKYSSLENHYNSKFIEKLYANGLTTGVWVAREKIHGTNFSLIIERDNVTCAKRTGPILPAEDFYGYEIVLKKYDKAIKTVQKFMYTAGAVSYQVFGEFAGGGIQKGVDYGEKDFYVFDILINTESGDCTYLTDYEMQDFCNEFGFKMAPMLGRGTFEELIMIPNDFDSVLAAYNATASEDLVEANNCVFDANVIGDNTAEGYVLKPCEPKWLPNGTRVAIKCKNSKFSEKKKSDKPIKTQVPLTEIDKNLLDVLACYVTLNRVNNVISKIGTVTPKDFGKVMGLTVQDILEETSREGIVLTTSDNPDLVKKELVRMVQDVLESAWRELVS

SEQ ID NO: 241 - DNA, 1029 bp, synthetic construct
  misc_feature 1..1029: note = variant of RNA ligase 2 from Escherichia phage RB69 (Bacteriophage RB69)
  source 1..1029: mol_type = other DNA
atgcatcaccatcaccatcacggtggcagcggtatgtttaagaaatattctagtctggaaaaccattacaatagcaaattcattgagaaactctatgctaacggcttaactactggtgtgtgggttgcgcgcgaaaagatccacgggacgaacttttcgctgattatcgagcgtgataatgtaacatgcgccaaacgtacaggcctgattaagcctgcagaagacttctacggttatgaaatcgtcctgaagaaatacgataaagcgattaagacggtgcagaaatttatgtataccgccggcgcggtttcctaccaagtgttcggagaatttgctggcaacggtatccagaaaggtgtcgattatggcgagaaagacttctatgtgtttgatattctgatcaatacggaatcaggagacaacacgtacctgactgattatgaaatgcaggacttctgtaatgaatttgggtttaagatggcaccaatgcttggtcgcggcacattcgatagcctgattatgattccgaacgatttcgattcggttctcatggcttacaatgcaacggcgagcgaggacctggtagaagcgaacaactgcgtctttgatgccaatgtgatcggtgataacactgctgaaggctatgttcttaaaccgtgtgaacccaaatggttaccgaatgggacgcgtgtggcgatcaaatgcaagaactccaaattcagcgagaagaagaaaagtgacaaaccgatcaagacacaagtcccactgacggaaattgataagaatctgctggacgtattggcctgttacgtcactttaaaccgcgtgaacaacgtgatctctaagattggaacagtgacgccgaaagattttggcaaagtaatgggtctgactgttcaggatattctggaagaaacgtcacgtgagggtattgttctgacgacatcggacaatcctgacctcgtcaagaaagaacttgtccgcatggtgcaggatgtattagaatcggcatggcgcgaactggtgtcg

SEQ ID NO: 242 - protein, 343 aa, synthetic construct
  REGION 1..343: note = variant of RNA ligase 2 from Escherichia phage RB69 (Bacteriophage RB69)
MHHHHHHGGSGMFKKYSSLENHYNSKFIEKLYANGLTTGVWVAREKIHGTNFSLIIERDNVTCAKRTGLIKPAEDFYGYEIVLKKYDKAIKTVQKFMYTAGAVSYQVFGEFAGNGIQKGVDYGEKDFYVFDILINTESGDNTYLTDYEMQDFCNEFGFKMAPMLGRGTFDSLIMIPNDFDSVLMAYNATASEDLVEANNCVFDANVIGDNTAEGYVLKPCEPKWLPNGTRVAIKCKNSKFSEKKKSDKPIKTQVPLTEIDKNLLDVLACYVTLNRVNNVISKIGTVTPKDFGKVMGLTVQDILEETSREGIVLTTSDNPDLVKKELVRMVQDVLESAWRELVS

SEQ ID NO: 243 - DNA, 1029 bp, synthetic construct
  misc_feature 1..1029: note = variant of RNA ligase 2 from Escherichia phage RB69 (Bacteriophage RB69)
  source 1..1029: mol_type = other DNA
atgcatcaccatcaccatcacggtggcagcggtatgtttaagaaatattctagtctggaaaaccattacaatagcaaattcattgagaaactctatgctaacggcttaactgatggtgaatgggttgcgcgcgaaaagatccacgggacgaacttttcgctgattatcgaacgtgataacgtaacatgcgccaaacgtacaggcccgattttgcctgcagaagacttctacggttatgaaatcgtcctgaagaaatacgataaagcgattaagacggtgcagaaatttatgtataccgccggcgcggtttcctaccaagtgttcggagaatttgctggcggcggtatccagaaaggtgtcgattatggcgagaaagacttctatgtgtttgatattctgatcaatacggaatcaggagacaacacgtacctgactgattatgaaatgcaggacttctgtaatgaatttgggtttaagatggcaccaatgcttggtcgcggcacattcgatagcctgattatgattccgaacgatttcgattcggttctcgctgcttacaatgcaacggcgagcgaggacctggtagaagcgaacaactgcgtctttgatgccaatgtgatcggtgataacactgctgaaggctatgttcttaaaccgtgtgaacccaaatggttaccgaatgggacgcgtgtggcgatcaaatgcaagaactccaaattcagcgagaagaagaaaagtgacaaaccgatcaagacacaagtcccactgacggaaatcgataagaatctgctggacgtattggcctgttacgtcactttaaaccgcgtgaacaacgtgatctctaagattggaacagtgacgccgaaagattttggcaaagtaatgggtctgactgttcaggatattctggaagaaacgtcacgtgagggtattgttctgacgacatcggacaatcctgacctcgtcaagaaagaacttgtccgcatggtgcaggatgtattagaatcggcatggcgcgaactggtgtcg

SEQ ID NO: 244 - protein, 343 aa, synthetic construct
  REGION 1..343: note = variant of RNA ligase 2 from Escherichia phage RB69 (Bacteriophage RB69)
MHHHHHHGGSGMFKKYSSLENHYNSKFIEKLYANGLTDGEWVAREKIHGTNFSLIIERDNVTCAKRTGPILPAEDFYGYEIVLKKYDKAIKTVQKFMYTAGAVSYQVFGEFAGGGIQKGVDYGEKDFYVFDILINTESGDNTYLTDYEMQDFCNEFGFKMAPMLGRGTFDSLIMIPNDFDSVLAAYNATASEDLVEANNCVFDANVIGDNTAEGYVLKPCEPKWLPNGTRVAIKCKNSKFSEKKKSDKPIKTQVPLTEIDKNLLDVLACYVTLNRVNNVISKIGTVTPKDFGKVMGLTVQDILEETSREGIVLTTSDNPDLVKKELVRMVQDVLESAWRELVS

SEQ ID NO: 245 - DNA, 1029 bp, synthetic construct
  misc_feature 1..1029: note = variant of RNA ligase 2 from Escherichia phage RB69 (Bacteriophage RB69)
  source 1..1029: mol_type = other DNA
atgcatcaccatcaccatcacggtggcagcggtatgtttaagaaatattctagtctggaaaaccattacaatagcaaattcattgagaaactctatgctaacggcttaactaccggtgaatgggttgcgcgcgaaaagatccacgggacgaacttttcgctgattatcgaacgtgataacgtaacatgcgccaaacgtacaggcccgattaagcctgcagaagacttctacggttatgaaatcgtcctgaagaaatacgataaagcgattaagacggtgcagaaatttatgcgcaccgccggcgcggtttcctaccaagtgttcggagaatttgctggcggcggtatccagaaaggtgtcgattatggcgagaaagacttctatgtgtttgatattctgatcaatacggaatcaggagacaacacgtacctgactgattatgaaatgcaggacttctgtaatgaatttgggtttaagatggcaccaatgcttggtcgcggcacattcgatagcctgattatgattccgaacgatttcgattcggttctcatggcttacaatgcaacggcgagcgaggacctggtagaagcgaacaactgcgtctttgatgccaatgtgatcggtgataacactgctgaaggctatgttcttaaaccgtgtgaacccaaatggttaccgaatgggacgcgtgtggcgatcaaatgcaagaactccaaattcagcgagaagaagaaaagtgacaaaccgatcaagacacaagtcccactgacggaagtcgataagaatctgctggacgtattggcctgttacgtcactttaaaccgcgtgaacaacgtgatctctaagattggaacagtgacgccgaaagattttggcaaagtaatgggtctgactgttcaggatattctggaagaaacgtcacgtgagggtattgttctgacgacatcggacaatcctgacctcgtcaagaaagaacttgttcgcatggtgcaggatgtattagaatcggcatggcgcgaactggtgtcg

SEQ ID NO: 246 - protein, 343 aa, synthetic construct
  REGION 1..343: note = variant of RNA ligase 2 from Escherichia phage RB69 (Bacteriophage RB69)
MHHHHHHGGSGMFKKYSSLENHYNSKFIEKLYANGLTTGEWVAREKIHGTNFSLIIERDNVTCAKRTGPIKPAEDFYGYEIVLKKYDKAIKTVQKFMRTAGAVSYQVFGEFAGGGIQKGVDYGEKDFYVFDILINTESGDNTYLTDYEMQDFCNEFGFKMAPMLGRGTFDSLIMIPNDFDSVLMAYNATASEDLVEANNCVFDANVIGDNTAEGYVLKPCEPKWLPNGTRVAIKCKNSKFSEKKKSDKPIKTQVPLTEVDKNLLDVLACYVTLNRVNNVISKIGTVTPKDFGKVMGLTVQDILEETSREGIVLTTSDNPDLVKKELVRMVQDVLESAWRELVS

SEQ ID NO: 247 - DNA, 1029 bp, synthetic construct
  misc_feature 1..1029: note = variant of RNA ligase 2 from Escherichia phage RB69 (Bacteriophage RB69)
  source 1..1029: mol_type = other DNA
atgcatcaccatcaccatcacggtggcagcggtatgtttaagaaatattctagtctggaaaaccattacaatagcaaattcattgagaaactccgcgctaacggcttaactactggtgtgtgggttgcgcgcgaaaagatccacgggacgaacttttcgctgattatcgaacgtgatcgcgtaacatgcgccaaacgtacaggcccgattttgcctgcagaagacttctacggttatgaaatcgtcctgaagaaatacgataaagcgattaagacggtgcagaaatttatgtataccgccggcgcggtttcctaccaagtgttcggagaatttgctggcggcggtatccagaaaggtgtcgattatggcgagaaagacttctatgtgtttgatattctgatcaatacggaatcaggagacgccacgtacctgactgattatgaaatgcaggacttctgtaatgaatttgggtttaagatggcaccaatgcttggtcgcggcacattcgaagagctgattcagattccgaacgatttcgattcggttctcgctgcttacaatgcaacggcgtcggaggacctggtaaaagcgaacaactgcgtctttgatgccaatgtgatcggtgataacactgctgaaggctatgttcttaaaccgtgtgaacccaaatggttaccgaatgggacgcgtgtggcgatcaaatgcaagaactccaaattcagcgagaagaagaaaagtgacaaaccgatcaagacacaagtcccactgacggaaattgataagaatctgctggacgtattggcctgttacgtcactttaaaccgcgtgaacaacgtgatctctaagattggaacagtgacgccgaaagattttggcaaagtaatgggtctgactgttcaggatattctggaagaaacgtcacgtgagggtattgttctgacgacatcggacaatcctaagctcgtcaagaaagaacttgttcgcatggtgcaggatgtattagaatcggcatggcgcgaactggtgtcg

SEQ ID NO: 248 - protein, 343 aa, synthetic construct
  REGION 1..343: note = variant of RNA ligase 2 from Escherichia phage RB69 (Bacteriophage RB69)
MHHHHHHGGSGMFKKYSSLENHYNSKFIEKLRANGLTTGVWVAREKIHGTNFSLIIERDRVTCAKRTGPILPAEDFYGYEIVLKKYDKAIKTVQKFMYTAGAVSYQVFGEFAGGGIQKGVDYGEKDFYVFDILINTESGDATYLTDYEMQDFCNEFGFKMAPMLGRGTFEELIQIPNDFDSVLAAYNATASEDLVKANNCVFDANVIGDNTAEGYVLKPCEPKWLPNGTRVAIKCKNSKFSEKKKSDKPIKTQVPLTEIDKNLLDVLACYVTLNRVNNVISKIGTVTPKDFGKVMGLTVQDILEETSREGIVLTTSDNPKLVKKELVRMVQDVLESAWRELVS

SEQ ID NO: 249 - DNA, 1029 bp, synthetic construct
  misc_feature 1..1029: note = variant of RNA ligase 2 from Escherichia phage RB69 (Bacteriophage RB69)
  source 1..1029: mol_type = other DNA
atgcatcaccatcaccatcacggtggcagcggtatgtttaagaaatattctagtctggaaaaccattacaatagcaaattcattgagaaactccgcgctaacggcttaactactggtgtgtgggttgcgcgcgaaaagatccacgggacgaacttttcgctgattatcgagcgtgataatgtaacatgcgccaaacgtacaggcccgattttgcctgcagaagacttctacggttatgaaatcgtcctgaagaaatacgataaagcgattaagacggtgcagaaatttatgtataccgccggcgcggtttcctaccaagtgttcggagaatttgctggcggcggtatccagaaaggtgtcgattatggcgagaaagacttctatgtgtttgatattctgatcaatacggaatcaggagacaatacgtacctgactgattatgaaatgcaggacttctgtaatgaatttgggtttaagatggcaccaatgcttggtcgcggcacattcgaaagtctgattatgattccgaacgatttcgattcggttctcgctgcttacaatgcaacggcgagcgaggacctggtagaagcgaacaactgcgtctttgatgccaatgtgactggtgataacactgctgaaggctatgttcttaaaccgtgtgaacccaaatggttaccgaatgggacgcgtgtggcgatcaaatgcaagaactccaaattcagcgagaagaagaaaagtgacaaaccgatcaagacacaagtcccactgacggaaattgataagaatctgctggacgtattggcctgttacgtcactttaaaccgcgtgaacaacgtgatctctaagattggaacagtgacgccgaaagattttggcaaagtaatgggtctgactgttcaggatattctggaagaaacgtcacgtgagggtattgttctgacgacatcggacaatcctaagctcgtcaagaaagaacttgttcgcatggtgcaggatgtattagaatcggcatggcgcgaactggtgtcg

SEQ ID NO: 250 - protein, 343 aa, synthetic construct
  REGION 1..343: note = variant of RNA ligase 2 from Escherichia phage RB69 (Bacteriophage RB69)
MHHHHHHGGSGMFKKYSSLENHYNSKFIEKLRANGLTTGVWVAREKIHGTNFSLIIERDNVTCAKRTGPILPAEDFYGYEIVLKKYDKAIKTVQKFMYTAGAVSYQVFGEFAGGGIQKGVDYGEKDFYVFDILINTESGDNTYLTDYEMQDFCNEFGFKMAPMLGRGTFESLIMIPNDFDSVLAAYNATASEDLVEANNCVFDANVTGDNTAEGYVLKPCEPKWLPNGTRVAIKCKNSKFSEKKKSDKPIKTQVPLTEIDKNLLDVLACYVTLNRVNNVISKIGTVTPKDFGKVMGLTVQDILEETSREGIVLTTSDNPKLVKKELVRMVQDVLESAWRELVS

SEQ ID NO: 251 - DNA, 1029 bp, synthetic construct
  misc_feature 1..1029: note = variant of RNA ligase 2 from Escherichia phage RB69 (Bacteriophage RB69)
  source 1..1029: mol_type = other DNA
atgcatcaccatcaccatcacggtggcagcggtatgtttaagaaatattctagtctggaaaaccattacaatagcaaattcattgagaaactctatgctaacggcttaactactggtgtgtgggttgcgcgcgaaaagatccacgggacgaacttttcgctgattatcgagcgtgataatgtaacatgcgccaaacgtacaggcccgattttgcctgcagaagacttctacggttatgaaatcgtcctgaagaaatacgataaagcgattaagacggtgcagaaatttatgtataccgccggcgcggtttcctaccaagtgttcggagaatttgctggcggcggtatccagaaaggtgtcgattatggcgagaaagacttctatgtgtttgatattctgatcaatacggaatcaggagacaacacgtacctgactgattatgaaatgcaggacttctgtaatgaatttgggtttaagatggcaccaatgcttggtcgcggcacattcgatagcctgattatgattccgaacgatttcgattcggttctcgctgcttacaatgcaacggcgagcgaggacctggtaaaagcgaacaactgcgtctttgatgccaatgtgatcggtgataacactgctgaaggctatgttcttaaaccgtgtgaacccaaatggttaccgaatgggacgcgtgtggcgatcaaatgcaagaactccaaattcagcgagaagaagaaaagtgacaaaccgatcaagacacaagtcccactgacggaaattgataagaatctgctggacgtattggcctgttacgtcactttaaaccgcgtgaacaacgtgatctctaagattggaacagtgacgccgaaagattttggcaaagtaatgggtctgactgttcaggatattctggaagaaacgtcacgtgagggtattgttctgacgacatcggacaatcctgacctcgtcaagaaagaacttgttcgcatggtgcaggatgtattagaatcggcatggcgcgaactggtgtcg

SEQ ID NO: 252 - protein, 343 aa, synthetic construct
  REGION 1..343: note = variant of RNA ligase 2 from Escherichia phage RB69 (Bacteriophage RB69)
MHHHHHHGGSGMFKKYSSLENHYNSKFIEKLYANGLTTGVWVAREKIHGTNFSLIIERDNVTCAKRTGPILPAEDFYGYEIVLKKYDKAIKTVQKFMYTAGAVSYQVFGEFAGGGIQKGVDYGEKDFYVFDILINTESGDNTYLTDYEMQDFCNEFGFKMAPMLGRGTFDSLIMIPNDFDSVLAAYNATASEDLVKANNCVFDANVIGDNTAEGYVLKPCEPKWLPNGTRVAIKCKNSKFSEKKKSDKPIKTQVPLTEIDKNLLDVLACYVTLNRVNNVISKIGTVTPKDFGKVMGLTVQDILEETSREGIVLTTSDNPDLVKKELVRMVQDVLESAWRELVS

SEQ ID NO: 253 - DNA, 1035 bp, synthetic construct
  misc_feature 1..1035: note = variant of RNA ligase 2 from Escherichia phage RB69 (Bacteriophage RB69)
  source 1..1035: mol_type = other DNA
atgcatcaccatcaccatcacggtggcagcggtatgtttaagaaatatagtagcctggaaaaccattacaattcgaaattcattgagaaactttattcattgggcttaaccggtggtgaatgggtggcgcgcgaaaagatccacggcacgaacttttccctgattatcgagcgtgataaagttacttgcgccaaacgtacaggcccgattctgccagcagaagacttcttcgggtacgaaatcatcctgaagaattatgctgatagcattaaagcggtccaggacattatggaaacctctgctgtggtgtcgtaccaagtatttggagaatttgcaggtccgggcatccagaagaacgtcgattactgtgataaagacttctatgtttttgatattattgtaaccaccgagagcggtgatgtgacgtatgttgacgactatatgatggaatccttctgcaatacgtttaaattcaagatggcccctttattaggacgcggcaaatttgaggagctgatcaaattgccgaacgatctggatagtgtcgtgcaggattacaactttactgttgatcatgcggggctggtggacgccaacaaatgtgtatggaatgcggaagcaaaaggtgaagtctttaccgcggaaggctatgtgctcaaaccctgctatccgtcttggcttcgcaatggcaatcgtgtcgccatcaaatgtaagaacagcaaattctcggagaagaagaaatcagacaaaccaattaaagctaaagttgaactgagtgaagcggataacaaactggtgggtattttggcatgctacgttacactgaatcgcgtgaacaacgtaatcagcaagattggcgaaattggtccgaaagatttcgggaaagttatgggtcttaccgtgcaagatatcctcgaagaaacgtctcgtgagggcatcaccttaactcaggccgacaatccttccctcattaagaaagaattggtcaagatggtgcaggatgttcttcgtccggcgtggattgagctcgtatcg

SEQ ID NO: 254 - protein, 345 aa, synthetic construct
  REGION 1..345: note = variant of RNA ligase 2 from Escherichia phage RB69 (Bacteriophage RB69)
MHHHHHHGGSGMFKKYSSLENHYNSKFIEKLYSLGLTGGEWVAREKIHGTNFSLIIERDKVTCAKRTGPILPAEDFFGYEIILKNYADSIKAVQDIMETSAVVSYQVFGEFAGPGIQKNVDYCDKDFYVFDIIVTTESGDVTYVDDYMMESFCNTFKFKMAPLLGRGKFEELIKLPNDLDSVVQDYNFTVDHAGLVDANKCVWNAEAKGEVFTAEGYVLKPCYPSWLRNGNRVAIKCKNSKFSEKKKSDKPIKAKVELSEADNKLVGILACYVTLNRVNNVISKIGEIGPKDFGKVMGLTVQDILEETSREGITLTQADNPSLIKKELVKMVQDVLRPAWIELVS

SEQ ID NO: 255 - DNA, 750 bp, synthetic construct
  misc_feature 1..750: note = wild type RNA ligase 2 Escherichia phage vB_EcoM_JS09
  source 1..750: mol_type = other DNA
atgcatcaccatcaccatcacggtggcagcggtatgtttaagaaatatagtagtctggaaaaccattacaatagcaaattcattgagaaattgtataccaacggcctgacgactggtgtgtgggttgcgcgcgaaaagatccacgggaccaacttttcgctcattatcgagcgtgataatgtaacatgcgccaaacgtactggtccgattctgccagcagaagacttctacggctatgaaatcgtcctgaagaaatacgataaagctattaaagcggtgcaggagtttatgtataccgctcgcgccgtcagctaccaagttttcggagaatttgcaggcggcggtatccagaaaggtgtggattatggcgaaaaagacttctatgtgtttgatatccttattaatacggaatccggagacaacacctacttaacggattatgaaatgcaggacttctgtaacgagtttgggtttaagatggcgccgatgctgggtcgcggcaccttcgatgccttgattaccatccctaatgatctggattctgttttagcggcgtacaacgcaacggcctcagaagacctggtagaagcgaataactgcgtctttgatgctaacgtgattggtgacaatacagcagagggctatgttctcaaaccgtgttttcccaaatggctgccgaatggtactcgtgtggccattaaatgcaagaacagcaaattctcggaaaagaagaaatccgataaagcgtac

SEQ ID NO: 256 - protein, 250 aa, synthetic construct
  REGION 1..250: note = wild type RNA ligase 2 Escherichia phage vB_EcoM_JS09
MHHHHHHGGSGMFKKYSSLENHYNSKFIEKLYTNGLTTGVWVAREKIHGTNFSLIIERDNVTCAKRTGPILPAEDFYGYEIVLKKYDKAIKAVQEFMYTARAVSYQVFGEFAGGGIQKGVDYGEKDFYVFDILINTESGDNTYLTDYEMQDFCNEFGFKMAPMLGRGTFDALITIPNDLDSVLAAYNATASEDLVEANNCVFDANVIGDNTAEGYVLKPCFPKWLPNGTRVAIKCKNSKFSEKKKSDKAY

SEQ ID NO: 257 - DNA, 1038 bp, synthetic construct
  misc_feature 1..1038: note = wild type RNA ligase 3Escherichia phage Bp7
  source 1..1038: mol_type = other DNA
atgcatcaccatcaccatcacggtggcagcggtatgtttaagaaatatagtagtctggaaaaccattacaatagcaaattcattgagaaactccgtaccaacggcttgacgggtggtgaatgggttgcgcgcgagaagatccacggcaccaacttttcgctgatcattgaacgtgatgccgtcacatgcgcaaaacgcacggggccgattttaccagctgaagacttctatggctacgaaatcgtactgaagaattatgcggattccatcaaatctgttcagcatctgattgagagcattaactaccaatcgtatcagatctacggtgaatttgcaggcaccggaatccagaagaatgtggattatggtgacaaagatttctatgtgtttgacattcgcgtgactaaagaagatggaagcgaatccgtccttaccgatactctgatggaggccttctgtatcatccacaaatttaaagtagcaccgtgcttagctaccgggtcatttgaagacctgattaaattgcctaatgatttcgattctgttgttccggactacaactttgccgtcgataatgccggtctgacgattgctaacagcacagacttcattcccaaagtggaaggcaaagtgtttaccgcagagggctttgtgctcaaaccggatgttccaacgtggcttccgaacggtaatcgtgtcgccattaagtgtaagaactcgaaattctccgagaaaaagaaaagcgacaaacctatcaaagtagctgtggtgctgagtcaagatgatatggatctgatgtggcagtttaccgactatgtcactgttaatcgcattaacaacgtgatctctaagattggcgaagtgtcaccgaaagatttcgggaaagtaatgggcttaacggttcaggacattctggaagaagcagcacgtgaagaattggagctgaccgatgccgaaaatcccgtcgaggtgaagaaacaactggttgaatgcgtcaaagaaacattacgccatgtgtggatcgaactggtaagcaag

SEQ ID NO: 258 - protein, 346 aa, synthetic construct
  REGION 1..346: note = wild type RNA ligase 3Escherichia phage Bp7
MHHHHHHGGSGMFKKYSSLENHYNSKFIEKLRTNGLTGGEWVAREKIHGTNFSLIIERDAVTCAKRTGPILPAEDFYGYEIVLKNYADSIKSVQHLIESINYQSYQIYGEFAGTGIQKNVDYGDKDFYVFDIRVTKEDGSESVLTDTLMEAFCIIHKFKVAPCLATGSFEDLIKLPNDFDSVVPDYNFAVDNAGLTIANSTDFIPKVEGKVFTAEGFVLKPDVPTWLPNGNRVAIKCKNSKFSEKKKSDKPIKVAVVLSQDDMDLMWQFTDYVTVNRINNVISKIGEVSPKDFGKVMGLTVQDILEEAAREELELTDAENPVEVKKQLVECVKETLRHVWIELVSK

SEQ ID NO: 259 - DNA, 1035 bp, synthetic construct
  misc_feature 1..1035: note = wild type RNA ligase 4Escherichia phage vB_EcoM_VR7
  source 1..1035: mol_type = other DNA
atgcatcaccatcaccatcacggtggcagcggtatgtttaagaaatattctagtctggaaaaccattacaataataaattcattgagaaattacgtacccacggcatgacggatggtgaatgggttgcgcgcgaaaagatccatggcaccaactttagcctgattattgaacgtgacgcagtgacttgcgctaaacgcacaggtccgatcctgccagccgaggatttctatgggtacgaaatcgtacttaagaactatgcggactcgattaaagcagtccaggaaatcatggaaacggcggccgctgtgagctaccaagtgtttggcgagttcgcgggaggaggcattcagaaaggtgtcgattatggtaccaaagacttctacgtgtttgatatcatcgttaccaccgaatcaggcgatgagacgtatgttgatgattatatgatgcactccttctgtaaatcgtttggctttaagattgctccgttgttgggtcgcggcaaatttgaagacctcattcagctgcctaatgatctggacagtgtagtaccggattacaacttcatggtcgacaatgtgggtctgactgaagcaaacagccatgtttggaaagcggaagccaaaggtgagacctttacagccgaagggtatgtgttaaagccctgctacccgaaatgggcgccaaatgggaaccgtgtcgccatcaagtgtaagaactccaaatttagcgagaagaagaaatctgataaaccgattaaagcgaaagtggaactgtcagaaatcgacaataatctgcttagcattctggcatgctatgttacgttaaaccgcgtgaacaacgtcatctcgaagattggcaaagttaccaccaaagatttcggcaaagtgatgggtctcacagtgcaagatattctggaagaaagtgcacgtgagggaatcactttggaacagacggacaatccttccgaggtcaagaaagaactgattgaaatggtaaaagaagttcttcgtccggtgtgggtagagctggttagc

SEQ ID NO: 260 - protein, 345 aa, synthetic construct
  REGION 1..345: note = wild type RNA ligase 4Escherichia phage vB_EcoM_VR7
MHHHHHHGGSGMFKKYSSLENHYNNKFIEKLRTHGMTDGEWVAREKIHGTNFSLIIERDAVTCAKRTGPILPAEDFYGYEIVLKNYADSIKAVQEIMETAAAVSYQVFGEFAGGGIQKGVDYGTKDFYVFDIIVTTESGDETYVDDYMMHSFCKSFGFKIAPLLGRGKFEDLIQLPNDLDSVVPDYNFMVDNVGLTEANSHVWKAEAKGETFTAEGYVLKPCYPKWAPNGNRVAIKCKNSKFSEKKKSDKPIKAKVELSEIDNNLLSILACYVTLNRVNNVISKIGKVTTKDFGKVMGLTVQDILEESAREGITLEQTDNPSEVKKELIEMVKEVLRPVWVELVS

SEQ ID NO: 261 - DNA, 1035 bp, synthetic construct
  misc_feature 1..1035: note = wild type RNA ligase 5Enterobacter phage PG7
  source 1..1035: mol_type = other DNA
atgcatcaccatcaccatcacggtggcagcggtatgtttgagaaatatagtaccctggaaaaccattacaatggcaagttcattgaacgtatccgcaacgcgggttttgatgtgagcgaaacgtgggttgcccgcgagaagattcacgggaccaatttctccgtcatcgtgactaaagacaacattcagccggcaaaacgtacaggaccaatcttaccggcggaagatttcttcggctatatggtaattatgggtcgctacgacgagtcgtttaaagctgttcaagccgcacttaccggcgctacggtggcgtatcagatctttggtgaatttgcaggcggcgggattcagaaaggagtcgattacggtgagaaagatttctatgtgtttgacatcaaagttaccaccgaatctggtgaatcaagctatgtcgatgattttatgatggaacgtatgtgcaatgtattcggctttaagatggctcctttgctgggtcgcggcaaatttgacgacctgattcaaatcccgaacatgctggatgtggtggtcaaccgttacaatcaggcgattgaagcccatgggctcgaagaagcgaacacgatgcccttccaggccgtagttagcgagtcgaatattgcggaaggctatgtgctgaagccgtgttaccctaaattctttccgaacggtagtcgcgttgccatcaaatgcaagaattccaaattttcagagaaagcgaaaagcgataaaccaattaaagcaaaagtggaactgactgatgtcgacaaagttgccttctctacattagcagcatatgccacgttgaaccgtgtgaataatgtcatctcgaagattggccaagtaggtccgaaagattttgggaaagttatgggtctgaccgtgcaggatatcctcgaagaagctggacgcgaggagatttttattactgacgctgataaccccgtggtggtcaagaaagaactggttaactacgtacagggcgttatccgtccggtgtggatcgaacttgtcagcaac

SEQ ID NO: 262 - protein, 345 aa, synthetic construct
  REGION 1..345: note = wild type RNA ligase 5Enterobacter phage PG7
MHHHHHHGGSGMFEKYSTLENHYNGKFIERIRNAGFDVSETWVAREKIHGTNFSVIVTKDNIQPAKRTGPILPAEDFFGYMVIMGRYDESFKAVQAALTGATVAYQIFGEFAGGGIQKGVDYGEKDFYVFDIKVTTESGESSYVDDFMMERMCNVFGFKMAPLLGRGKFDDLIQIPNMLDVVVNRYNQAIEAHGLEEANTMPFQAVVSESNIAEGYVLKPCYPKFFPNGSRVAIKCKNSKFSEKAKSDKPIKAKVELTDVDKVAFSTLAAYATLNRVNNVISKIGQVGPKDFGKVMGLTVQDILEEAGREEIFITDADNPVVVKKELVNYVQGVIRPVWIELVSN

SEQ ID NO: 263 - DNA, 1038 bp, synthetic construct
  misc_feature 1..1038: note = wild type RNA ligase 6Salmonella phage S16 (Salmonella phage vB_SenM-S16)
  source 1..1038: mol_type = other DNA
atgcatcaccatcaccatcacggtggcagcggtatgtttaagaaatatagtagtctggaaaaccattacaataataaattcattagcaagatccgctttgagggcaaagatggtggtttatgggtggcgcgtgaaaagattcacggcaccaacttctcgatcatcgtctccaaagacagcgtttcggcctgcaaacgctcagggccgattctgccaagcgaaagcttctatggacatgagattattctcaagaactacgatgaatcgatcaagacgatccagcgttgtatgaacgcaaatgaacttggctctgtgtcctcctaccaaatctttggtgaatttgctggccagggcattcagaaagaggtagactatggtgagaaagatttctatgtgtttgatattctggttaacacccaaaatggaaacgtcctgtatatggacgacatgatgatgactagcttctgcaacgaatttgggttcaagatggcgccgtttattggttgtggcagtttcgatgaattgattcagctgcccaataattttacatctgtgatcaaagcctacaacgaagcggcgaaagatgatttgaaagaggtaaatctgtgcgtctttgatccgttagttaccgacgacaacgtggcagaaggctatgttctgaaacctgtctacccggatttctttaataatggtacgcgcatcgccatcaaaagcaagaactctcgtttcaccgagaagaagaaatcggacaaaccaatcaaaccgaaagctgtacttacgtccaacgattcaactgtgctggcaaacctgtgtgaatattcaacctggaatcgcgtgagcaacgttatttcccacattggagaagtcaaagcgaaagattttgggaaagtgatgggtttgacaattcaggatatctttatcgaagccaaacgtgaaggcgttgacattgtacatgcggataacccggatctcgtgaaacgcgagctgcaaaccgtcgtctcgaatacgatccgtgagaaatggctggaaattgtgtcg

SEQ ID NO: 264 - protein, 346 aa, synthetic construct
  REGION 1..346: note = wild type RNA ligase 6Salmonella phage S16 (Salmonella phage vB_SenM-S16)
MHHHHHHGGSGMFKKYSSLENHYNNKFISKIRFEGKDGGLWVAREKIHGTNFSIIVSKDSVSACKRSGPILPSESFYGHEIILKNYDESIKTIQRCMNANELGSVSSYQIFGEFAGQGIQKEVDYGEKDFYVFDILVNTQNGNVLYMDDMMMTSFCNEFGFKMAPFIGCGSFDELIQLPNNFTSVIKAYNEAAKDDLKEVNLCVFDPLVTDDNVAEGYVLKPVYPDFFNNGTRIAIKSKNSRFTEKKKSDKPIKPKAVLTSNDSTVLANLCEYSTWNRVSNVISHIGEVKAKDFGKVMGLTIQDIFIEAKREGVDIVHADNPDLVKRELQTVVSNTIREKWLEIVS

SEQ ID NO: 265 - DNA, 1050 bp, synthetic construct
  misc_feature 1..1050: note = wild type RNA ligase 7Acinetobacter phage ZZ1
  source 1..1050: mol_type = other DNA
atgcatcaccatcaccatcacggtggcagcggtatgacctttaagaaatatagtagtctggaaaaccatacgaatggcaaattcattcaggcgtgctttgatgtggccgcccaaaacggtggtaacgcatgtgagttcgttgctcgcgaaaagatccacggcaccaatttcagcattatcatcactaaagacaatattcaggcgtgcaaacgttcaggaccgattggcccaacagagaaattctttgggtacgaagatgtcatgaaagacttagatgatgtgtttaaagcggtacagaaactgctgatcgacaacggtgatggctggaactccatgcaaatctttggtgaatatgcaggcgggaatattcagaaggaagttgattacggtccgaaaagcttctatgtctttgacatctttttggatgctcctgcagcgggcatttctaatggatggtgggatgatcgctcggtgcaggccttctgtgaacatcatggcctcaagattgcaccgctgattgcgcacggtagccttgagcaactgctgaaattacccgtggaatttaacaccatcgttccgtctcttacgtgggacaacatgtacgggtatcatgcgcagcctgctccaaccgacaatgtaggcgaaggtctggtcattaaaccggtgtatccgctctttttgaacaacggttcgcgtgttgccatcaaatacaagacggacaaattcaaagagaaaggcaaaggaaaactgcccaagattccggtgccactgtccgaagccgataaagatctgctgaataaattgagcgaattctcaactaaagcgcgcatctcgaatgtagcctcacatatcggggagttaaacccgaagatgtttgggaaactgctgggtatgaccatgcatgatcttctcacagaagcagaacgtgagggcatctccattaatcaggctgaagcgccgagtaaactgaaaggtgaattgcaaaagattgtccaggttgatgtgcgcgagtattggaccgaacaggactttgcggtgcacaaagtcgag

SEQ ID NO: 266 - protein, 350 aa, synthetic construct
  REGION 1..350: note = wild type RNA ligase 7Acinetobacter phage ZZ1
MHHHHHHGGSGMTFKKYSSLENHTNGKFIQACFDVAAQNGGNACEFVAREKIHGTNFSIIITKDNIQACKRSGPIGPTEKFFGYEDVMKDLDDVFKAVQKLLIDNGDGWNSMQIFGEYAGGNIQKEVDYGPKSFYVFDIFLDAPAAGISNGWWDDRSVQAFCEHHGLKIAPLIAHGSLEQLLKLPVEFNTIVPSLTWDNMYGYHAQPAPTDNVGEGLVIKPVYPLFLNNGSRVAIKYKTDKFKEKGKGKLPKIPVPLSEADKDLLNKLSEFSTKARISNVASHIGELNPKMFGKLLGMTMHDLLTEAEREGISINQAEAPSKLKGELQKIVQVDVREYWTEQDFAVHKVE

SEQ ID NO: 267 - DNA, 1050 bp, synthetic construct
  misc_feature 1..1050: note = wild type RNA ligase 8Klebsiella phage KP27
  source 1..1050: mol_type = other DNA
atgcatcaccatcaccatcacggtggcagcggtatgtttaagaaatatagtagcctgaccaaccattacgaaggcaaattcatcaatggtgtgattatgaacgggttaacgggtggcgtttgggtagcgcgcgagaagattcacggcgccaacttctcgtttatcactgatgatggaattaccgttactccggcaaaacgtacagacgtcgtgaaaccagctgaagacttctatggttgctcagcggtggtggccaaatactctcctggcatccgcaagatgtgggaaaccctgaagaagacggggacctatgatgatctcgtcattcaggtatacggtgagtttgcaggacgtggcgtgcaaaaagatgttgactatggtgagaaagacttctacgtctttgatatccgcgttaatggcgaatttttgccggataacctgtgttcccttattagccgttcccatggcctgaaaatggcgccgctgctgggttatgggacgttcgaagaaatcaaagaattgcccattacctttgaaagcgtggtgaataaagccaatagtggcattggctcggacaacacagtctatggtgagtttgtttacccgatcatggatgtagaagaaggtaacattgctgaggggttcgtgatgaaaccagtctctccggcgtttatgcctaatggagaacgcgttgcaatcaaatgcaagaccaccaaatttacggagaagaaagcgaagaaagccactcgtttcaacgctccggtgtcattaagcgagaaagacaagaatcagctggatgaattcgtctgttatctcacggaaaaccgcgtgaagaatgtactgtcgaaacttgatctggcgagcattaccgccaaagattttggtcgtatcatgggcttgaccgttcaggacgcgatcgaagaaattagtcgcaatcacggcccctttctggagcaattcgaagatccagcaatggccaagaaactgtttgtgacagaagcacagaacatgattcgtccggtttggggcaagatcctcaaccatgaattc

SEQ ID NO: 268 - protein, 350 aa, synthetic construct
  REGION 1..350: note = wild type RNA ligase 8Klebsiella phage KP27
MHHHHHHGGSGMFKKYSSLTNHYEGKFINGVIMNGLTGGVWVAREKIHGANFSFITDDGITVTPAKRTDVVKPAEDFYGCSAVVAKYSPGIRKMWETLKKTGTYDDLVIQVYGEFAGRGVQKDVDYGEKDFYVFDIRVNGEFLPDNLCSLISRSHGLKMAPLLGYGTFEEIKELPITFESVVNKANSGIGSDNTVYGEFVYPIMDVEEGNIAEGFVMKPVSPAFMPNGERVAIKCKTTKFTEKKAKKATRFNAPVSLSEKDKNQLDEFVCYLTENRVKNVLSKLDLASITAKDFGRIMGLTVQDAIEEISRNHGPFLEQFEDPAMAKKLFVTEAQNMIRPVWGKILNHEF

SEQ ID NO: 269 - DNA, 1029 bp, synthetic construct
  misc_feature 1..1029: note = variant of RNA ligase 2 from Escherichia phage RB69 (Bacteriophage RB69)
  source 1..1029: mol_type = other DNA
atgcatcaccatcaccatcacggtggcagcggtatgtttaagaaatattctagtctggaaaaccattacaatagcaaattcattgagaaactctatgctaacggcttaactgatggtgtatgggttgcgcgcgaaaagatccacgggacgaacttttcgctgattatcgagcgtgataatgtaacatgcgccaaacgtacaggcccgattaagcctgcagaagacttctacggttatgaaatcgtcctgaagaaatacgataaagcgattaagacggtgcagaaatttatgtataccgccggcacggtttcctaccaagtgttcggagaatttgctggcaacggtatccagaaaggtgtcgattatggcgagaaagacttctatgtgtttgatattctgatcaatacggaatcaggagacaacacgtacctgactgattatgaaatgcaggacttctgtaatgaatttgggtttaagatggcaccaatgcttggtcgcggcacattcgatagcctgattatgattccgaacgatttcgattcggttctcatggcttacaatgcaacggcgaaagaggacctggtaaaagcgaacaactgcgtctttgatgccaatgtgatcggtgataacactgctgaaggctatgttcttaaaccgtgtgaacccaaatggttaccgaatgggacgcgtgtggcgatcaaatgcaagaactccaaattcagcgagaagaagaaaagtgacaaaccgatcaagacacaagtcccactgacggaaattgataagaatctgctggacgtattggcctgttacgtcactttaaaccgcgtgaacaacgtgatctctaagattggaacagtgacgccgaaagattttggcaaagtaatgggtctgactgttcaggatattctggaagaaacgtcacgtgagggtattgttctgacgacatcggacaatcctgacctcgtcaagaaagaacttgttcgcatggtgcaggatgtattagaatcggcatggcgcgaactggtgtcg

SEQ ID NO: 270 - protein, 343 aa, synthetic construct
  REGION 1..343: note = variant of RNA ligase 2 from Escherichia phage RB69 (Bacteriophage RB69)
MHHHHHHGGSGMFKKYSSLENHYNSKFIEKLYANGLTDGVWVAREKIHGTNFSLIIERDNVTCAKRTGPIKPAEDFYGYEIVLKKYDKAIKTVQKFMYTAGTVSYQVFGEFAGNGIQKGVDYGEKDFYVFDILINTESGDNTYLTDYEMQDFCNEFGFKMAPMLGRGTFDSLIMIPNDFDSVLMAYNATAKEDLVKANNCVFDANVIGDNTAEGYVLKPCEPKWLPNGTRVAIKCKNSKFSEKKKSDKPIKTQVPLTEIDKNLLDVLACYVTLNRVNNVISKIGTVTPKDFGKVMGLTVQDILEETSREGIVLTTSDNPDLVKKELVRMVQDVLESAWRELVS

SEQ ID NO: 271 - DNA, 1029 bp, synthetic construct
  misc_feature 1..1029: note = variant of RNA ligase 2 from Escherichia phage RB69 (Bacteriophage RB69)
  source 1..1029: mol_type = other DNA
atgcatcaccatcaccatcacggtggcagcggtatgtttaagaaatatcctagtctggaaaaccattacaatagcaaattcattgagaaactctatgctaacggcttaactgatggtgtatgggttgcgcgcgaaaagatccacgggacgaacttttcgctgattatcgagcgtgataatgtaacatgcgccaaacgtacaggcccgattaagcctgcagaagacttctacggttatgaaatcgtcctgaagaaatacgataaagcgattaagacggtgcagaaatttatgtataccgccggcgcggtttcctaccaagtgttcggagaatttgctggcaacggtatccagaaaggtgtcgattatggcgagaaagacttctatgtgtttgatattctgatcaatacggaatcaggagacaacacgtacctgactgattatgaaatgcaggacttctgtaatgaatttgggtttaagatggcaccaatgcttggtcgcggcacattcgatagcctgattatgattccgaacgatttcgattcggttctcatggcttacaatgcaacggcgaaagaggacctggtaaaagcgaacaactgcgtctttgatgccaatgtgatcggtgataacactgctgaaggctatgttcttaaaccgtgtgaacccaaatggttaccgaatgggacgcgtgtggcgatcaaatgcaagaactccaaattcagcgagaagaagaaaagtgacaaaccgatcaagacacaagtcccactgacggaaattgataagaatctgctggacgtattggcctgttacgtcactttaaaccgcgtgaacaacgtgatctctaagattggaacagtgacgccgaaagattttggcaaagtaatgggtctgactgttcaggatattctggaagaaacgtcacgtgagggtattgttctgacgacatcggacaatcctgacctcgtcaagaaagaacttgttcgcatggtgcaggatgtattagaatcggcatggcgcgaactggtgtcg

SEQ ID NO: 272 - protein, 343 aa, synthetic construct
  REGION 1..343: note = variant of RNA ligase 2 from Escherichia phage RB69 (Bacteriophage RB69)
MHHHHHHGGSGMFKKYPSLENHYNSKFIEKLYANGLTDGVWVAREKIHGTNFSLIIERDNVTCAKRTGPIKPAEDFYGYEIVLKKYDKAIKTVQKFMYTAGAVSYQVFGEFAGNGIQKGVDYGEKDFYVFDILINTESGDNTYLTDYEMQDFCNEFGFKMAPMLGRGTFDSLIMIPNDFDSVLMAYNATAKEDLVKANNCVFDANVIGDNTAEGYVLKPCEPKWLPNGTRVAIKCKNSKFSEKKKSDKPIKTQVPLTEIDKNLLDVLACYVTLNRVNNVISKIGTVTPKDFGKVMGLTVQDILEETSREGIVLTTSDNPDLVKKELVRMVQDVLESAWRELVS

SEQ ID NO: 273 - DNA, 1029 bp, synthetic construct
  misc_feature 1..1029: note = variant of RNA ligase 2 from Escherichia phage RB69 (Bacteriophage RB69)
  source 1..1029: mol_type = other DNA
atgcatcaccatcaccatcacggtggcagcggtatgtttaagaaatattctagtctggaaaaccattacaatagcaaattcattgagaaactctatgctaacggcttaactgatggtgtatgggttgcgcgcgaaaagatccacgggacgaacttttcgctgattatcgagcgtgataatgtaacatgcgccaaacgtacaggcccgattaagcctgcagaagacttctacggttatgaaatcgtcctgaagaaatacgataaagcgattaagacggtgcagaaatttatgtataccgccggcgcggtttcctaccaagtgttcggagaatttgctggcaacggtatccagaaaggtgtcgattatggcgagaaagacttctatgtgtttgatattctgatcaatacggaatcaggagacaacacgtacctgactgattatgaaatgcaggacttctgtaatgaatttgggtttaagatggcaccaatgcttggtcgcggcacattcgatagcctgattatgattccgaacgatttcgattcggttctcatggcttacaatgcaacgtttaaagaggacctggtaaaagcgaacaactgcgtctttgatgccaatgtgatcggtgataacactgctgaaggctatgttcttaaaccgtgtgaacccaaatggttaccgaatgggacgcgtgtggcgatcaaatgcaagaactccaaattcagcgagaagaagaaaagtgacaaaccgatcaagacacaagtcccactgacggaaattgataagaatctgctggacgtattggcctgttacgtcactttaaaccgcgtgaacaacgtgatctctaagattggaacagtgacgccgaaagattttggcaaagtaatgggtctgactgttcaggatattctggaagaaacgtcacgtgagggtattgttctgacgacatcggacaatcctgacctcgtcaagaaagaacttgttcgcatggtgcaggatgtattagaatcggcatggcgcgaactggtgtcg

SEQ ID NO: 274 - protein, 343 aa, synthetic construct
  REGION 1..343: note = variant of RNA ligase 2 from Escherichia phage RB69 (Bacteriophage RB69)
MHHHHHHGGSGMFKKYSSLENHYNSKFIEKLYANGLTDGVWVAREKIHGTNFSLIIERDNVTCAKRTGPIKPAEDFYGYEIVLKKYDKAIKTVQKFMYTAGAVSYQVFGEFAGNGIQKGVDYGEKDFYVFDILINTESGDNTYLTDYEMQDFCNEFGFKMAPMLGRGTFDSLIMIPNDFDSVLMAYNATFKEDLVKANNCVFDANVIGDNTAEGYVLKPCEPKWLPNGTRVAIKCKNSKFSEKKKSDKPIKTQVPLTEIDKNLLDVLACYVTLNRVNNVISKIGTVTPKDFGKVMGLTVQDILEETSREGIVLTTSDNPDLVKKELVRMVQDVLESAWRELVS

SEQ ID NO: 275 - DNA, 1029 bp, synthetic construct
  misc_feature 1..1029: note = variant of RNA ligase 2 from Escherichia phage RB69 (Bacteriophage RB69)
  source 1..1029: mol_type = other DNA
atgcatcaccatcaccatcacggtggcagcggtatgtttaagaaacgttctagtctggaaaaccattacaatagcaaattcattgagaaactctatgctaacggcttaactgatggtgtatgggttgcgcgcgaaaagatccacgggacgaacttttcgctgattatcgagcgtgataatgtaacatgcgccaaacgtacaggcccgattaagcctgcagaagacttctacggttatgaaatcgtcctgaagaaatacgataaagcgattaagacggtgcagaaatttatgtataccgccggcgcggtttcctaccaagtgttcggagaatttgctggcaacggtatccagaaaggtgtcgattatggcgagaaagacttctatgtgtttgatattctgatcaatacggaatcaggagacaacacgtacctgactgattatgaaatgcaggacttctgtaatgaatttgggtttaagatggcaccaatgcttggtcgcggcacattcgatagcctgattatgattccgaacgatttcgattcggttctcatggcttacaatgcaacggcgaaagaggacctggtaaaagcgaacaactgcgtctttgatgccaatgtgatcggtgataacactgctgaaggctatgttcttaaaccgtgtgaacccaaatggttaccgaatgggacgcgtgtggcgatcaaatgcaagaactccaaattcagcgagaagaagaaaagtgacaaaccgatcaagacacaagtcccactgacggaaattgataagaatctgctggacgtattggcctgttacgtcactttaaaccgcgtgaacaacgtgatctctaagattggaacagtgacgccgaaagattttggcaaagtaatgggtctgactgttcaggatattctggaagaaacgtcacgtgagggtattgttctgacgacatcggacaatcctgacctcgtcaagaaagaacttgttcgcatggtgcaggatgtattagaatcggcatggcgcgaactggtgtcg

SEQ ID NO: 276 - protein, 343 aa, synthetic construct
  REGION 1..343: note = variant of RNA ligase 2 from Escherichia phage RB69 (Bacteriophage RB69)
MHHHHHHGGSGMFKKRSSLENHYNSKFIEKLYANGLTDGVWVAREKIHGTNFSLIIERDNVTCAKRTGPIKPAEDFYGYEIVLKKYDKAIKTVQKFMYTAGAVSYQVFGEFAGNGIQKGVDYGEKDFYVFDILINTESGDNTYLTDYEMQDFCNEFGFKMAPMLGRGTFDSLIMIPNDFDSVLMAYNATAKEDLVKANNCVFDANVIGDNTAEGYVLKPCEPKWLPNGTRVAIKCKNSKFSEKKKSDKPIKTQVPLTEIDKNLLDVLACYVTLNRVNNVISKIGTVTPKDFGKVMGLTVQDILEETSREGIVLTTSDNPDLVKKELVRMVQDVLESAWRELVS

SEQ ID NO: 277 - DNA, 1029 bp, synthetic construct
  misc_feature 1..1029: note = variant of RNA ligase 2 from Escherichia phage RB69 (Bacteriophage RB69)
  source 1..1029: mol_type = other DNA
atgcatcaccatcaccatcacggtggcagcggtatgtttaagaaatattctagtctggaaaaccattacaatagcaaattcattgagaaactctatgctaacggcttaactgatggtgtatgggttgcgcgcgaaaagatccacgggacgaacttttcgctgattatcgagcgtgataatgtaacatgcgccaaacgtacatggccgattaagcctgcagaagacttctacggttatgaaatcgtcctgaagaaatacgataaagcgattaagacggtgcagaaatttatgtataccgccggcgcggtttcctaccaagtgttcggagaatttgctggcaacggtatccagaaaggtgtcgattatggcgagaaagacttctatgtgtttgatattctgatcaatacggaatcaggagacaacacgtacctgactgattatgaaatgcaggacttctgtaatgaatttgggtttaagatggcaccaatgcttggtcgcggcacattcgatagcctgattatgattccgaacgatttcgattcggttctcatggcttacaatgcaacggcgaaagaggacctggtaaaagcgaacaactgcgtctttgatgccaatgtgatcggtgataacactgctgaaggctatgttcttaaaccgtgtgaacccaaatggttaccgaatgggacgcgtgtggcgatcaaatgcaagaactccaaattcagcgagaagaagaaaagtgacaaaccgatcaagacacaagtcccactgacggaaattgataagaatctgctggacgtattggcctgttacgtcactttaaaccgcgtgaacaacgtgatctctaagattggaacagtgacgccgaaagattttggcaaagtaatgggtctgactgttcaggatattctggaagaaacgtcacgtgagggtattgttctgacgacatcggacaatcctgacctcgtcaagaaagaacttgttcgcatggtgcaggatgtattagaatcggcatggcgcgaactggtgtcg

SEQ ID NO: 278 - protein, 343 aa, synthetic construct
  REGION 1..343: note = variant of RNA ligase 2 from Escherichia phage RB69 (Bacteriophage RB69)
MHHHHHHGGSGMFKKYSSLENHYNSKFIEKLYANGLTDGVWVAREKIHGTNFSLIIERDNVTCAKRTWPIKPAEDFYGYEIVLKKYDKAIKTVQKFMYTAGAVSYQVFGEFAGNGIQKGVDYGEKDFYVFDILINTESGDNTYLTDYEMQDFCNEFGFKMAPMLGRGTFDSLIMIPNDFDSVLMAYNATAKEDLVKANNCVFDANVIGDNTAEGYVLKPCEPKWLPNGTRVAIKCKNSKFSEKKKSDKPIKTQVPLTEIDKNLLDVLACYVTLNRVNNVISKIGTVTPKDFGKVMGLTVQDILEETSREGIVLTTSDNPDLVKKELVRMVQDVLESAWRELVS

SEQ ID NO: 279 - DNA, 1029 bp, synthetic construct
  misc_feature 1..1029: note = variant of RNA ligase 2 from Escherichia phage RB69 (Bacteriophage RB69)
  source 1..1029: mol_type = other DNA
atgcatcaccatcaccatcacggtggcagcggtatgtttaagaaatattctagtctggaaaaccatatgaatagcaaattcattgagaaactctatgctaacggcttaactgatggtgtatgggttgcgcgcgaaaagatccacgggacgaacttttcgctgattatcgagcgtgataatgtaacatgcgccaaacgtacaggcccgattaagcctgcagaagacttctacggttatgaaatcgtcctgaagaaatacgataaagcgattaagacggtgcagaaatttatgtataccgccggcgcggtttcctaccaagtgttcggagaatttgctggcaacggtatccagaaaggtgtcgattatggcgagaaagacttctatgtgtttgatattctgatcaatacggaatcaggagacaacacgtacctgactgattatgaaatgcaggacttctgtaatgaatttgggtttaagatggcaccaatgcttggtcgcggcacattcgatagcctgattatgattccgaacgatttcgattcggttctcatggcttacaatgcaacggcgaaagaggacctggtaaaagcgaacaactgcgtctttgatgccaatgtgatcggtgataacactgctgaaggctatgttcttaaaccgtgtgaacccaaatggttaccgaatgggacgcgtgtggcgatcaaatgcaagaactccaaattcagcgagaagaagaaaagtgacaaaccgatcaagacacaagtcccactgacggaaattgataagaatctgctggacgtattggcctgttacgtcactttaaaccgcgtgaacaacgtgatctctaagattggaacagtgacgccgaaagattttggcaaagtaatgggtctgactgttcaggatattctggaagaaacgtcacgtgagggtattgttctgacgacatcggacaatcctgacctcgtcaagaaagaacttgttcgcatggtgcaggatgtattagaatcggcatggcgcgaactggtgtcg

SEQ ID NO: 280 - protein, 343 aa, synthetic construct
  REGION 1..343: note = variant of RNA ligase 2 from Escherichia phage RB69 (Bacteriophage RB69)
MHHHHHHGGSGMFKKYSSLENHMNSKFIEKLYANGLTDGVWVAREKIHGTNFSLIIERDNVTCAKRTGPIKPAEDFYGYEIVLKKYDKAIKTVQKFMYTAGAVSYQVFGEFAGNGIQKGVDYGEKDFYVFDILINTESGDNTYLTDYEMQDFCNEFGFKMAPMLGRGTFDSLIMIPNDFDSVLMAYNATAKEDLVKANNCVFDANVIGDNTAEGYVLKPCEPKWLPNGTRVAIKCKNSKFSEKKKSDKPIKTQVPLTEIDKNLLDVLACYVTLNRVNNVISKIGTVTPKDFGKVMGLTVQDILEETSREGIVLTTSDNPDLVKKELVRMVQDVLESAWRELVS

SEQ ID NO: 281 - DNA, 1029 bp, synthetic construct
  misc_feature 1..1029: note = variant of RNA ligase 2 from Escherichia phage RB69 (Bacteriophage RB69)
  source 1..1029: mol_type = other DNA
atgcatcaccatcaccatcacggtggcagcggtatgtttaagaaatattctagtctggaaaaccattacaatagcaaattcattgagaaactctatgctaacggcttaactgatggtgtatgggttgcgcgcgaaaagatccacgggacgaacttttcgctgattatcgagcgtgataatgtaacatgcgccaaacgtacaggcccgattaagcctgcagaagacttctacggttatgaaatcgtcctgaagaaatacgataaagcgattaagacggtgcagaaatttatgtataccgccggcgcggtttcctaccaagtgttcggagaatttgctggcaacggtatccagaaaggtgtcgattatggcgagaaagacttctatgtgtttgatattctgatcaatacggaatcaggagacaacacgtacctgactgattatgaaatgcaggacttctgtaatgaatttgggtttaagatggcaccaatgcttggtcgcggcacattcgatagcctgattatgattccgaacgatttcgattcggttctcatggcttacaatgcaacggcgaaagaggacctggtaaaagcgaacaactgcgtctttgatgccaatgtgatcggtgataacactgctgaaggctatgttcttaaaccgtgtgaacccaaatggttaccgaatgggacgcgtgtggcgatcaaatgcaagaactccaaattcagcgagaagaagaaaagtgacaaaccgatcaagacacaagtcccactgacggaaattgataagaatctgctggacgtattggcctgtgcggtcactttaaaccgcgtgaacaacgtgatctctaagattggaacagtgacgccgaaagattttggcaaagtaatgggtctgactgttcaggatattctggaagaaacgtcacgtgagggtattgttctgacgacatcggacaatcctgacctcgtcaagaaagaacttgttcgcatggtgcaggatgtattagaatcggcatggcgcgaactggtgtcg

SEQ ID NO: 282 - protein, 343 aa, synthetic construct
  REGION 1..343: note = variant of RNA ligase 2 from Escherichia phage RB69 (Bacteriophage RB69)
MHHHHHHGGSGMFKKYSSLENHYNSKFIEKLYANGLTDGVWVAREKIHGTNFSLIIERDNVTCAKRTGPIKPAEDFYGYEIVLKKYDKAIKTVQKFMYTAGAVSYQVFGEFAGNGIQKGVDYGEKDFYVFDILINTESGDNTYLTDYEMQDFCNEFGFKMAPMLGRGTFDSLIMIPNDFDSVLMAYNATAKEDLVKANNCVFDANVIGDNTAEGYVLKPCEPKWLPNGTRVAIKCKNSKFSEKKKSDKPIKTQVPLTEIDKNLLDVLACAVTLNRVNNVISKIGTVTPKDFGKVMGLTVQDILEETSREGIVLTTSDNPDLVKKELVRMVQDVLESAWRELVS

SEQ ID NO: 283 - DNA, 1029 bp, synthetic construct
  misc_feature 1..1029: note = variant of RNA ligase 2 from Escherichia phage RB69 (Bacteriophage RB69)
  source 1..1029: mol_type = other DNA
atgcatcaccatcaccatcacggtggcagcggtatgtttaagaaatattctagtctggaaaaccattacaatagcaaattcattgagaaactctatgctaacggcttaactgatggtgtatgggttgcgcgcgaaaagatccacgggacgaacttttcgctgattatcgagcgtgataatgtaacatgcgccaaacgtacaggcccgattaagcctgcagaagacttctacggttatgaaatcgtcctgaagaaatacgataaagcgattaagacggtgcagaaatttatgtataccgccggcgcggtttcctaccaagtgttcggagaatttgctggcaacggtatcaagaaaggtgtcgattatggcgagaaagacttctatgtgtttgatattctgatcaatacggaatcaggagacaacacgtacctgactgattatgaaatgcaggacttctgtaatgaatttgggtttaagatggcaccaatgcttggtcgcggcacattcgatagcctgattatgattccgaacgatttcgattcggttctcatggcttacaatgcaacggcgaaagaggacctggtaaaagcgaacaactgcgtctttgatgccaatgtgatcggtgataacactgctgaaggctatgttcttaaaccgtgtgaacccaaatggttaccgaatggggcgcgtgtggcgatcaaatgcaagaactccaaattcagcgagaagaagaaaagtgacaaaccgatcaagacacaagtcccactgacggaaattgataagaatctgctggacgtattggcctgttacgtcactttaaaccgcgtgaacaacgtgatctctaagattggaacagtgacgccgaaagattttggcaaagtaatgggtctgactgttcaggatattctggaagaaacgtcacgtgagggtattgttctgacgacatcggacaatcctgacctcgtcaagaaagaacttgttcgcatggtgcaggatgtattagaatcggcatggcgcgaactggtgtcg

SEQ ID NO: 284 - protein, 343 aa, synthetic construct
  REGION 1..343: note = variant of RNA ligase 2 from Escherichia phage RB69 (Bacteriophage RB69)
MHHHHHHGGSGMFKKYSSLENHYNSKFIEKLYANGLTDGVWVAREKIHGTNFSLIIERDNVTCAKRTGPIKPAEDFYGYEIVLKKYDKAIKTVQKFMYTAGAVSYQVFGEFAGNGIKKGVDYGEKDFYVFDILINTESGDNTYLTDYEMQDFCNEFGFKMAPMLGRGTFDSLIMIPNDFDSVLMAYNATAKEDLVKANNCVFDANVIGDNTAEGYVLKPCEPKWLPNGARVAIKCKNSKFSEKKKSDKPIKTQVPLTEIDKNLLDVLACYVTLNRVNNVISKIGTVTPKDFGKVMGLTVQDILEETSREGIVLTTSDNPDLVKKELVRMVQDVLESAWRELVS

SEQ ID NO: 285 - DNA, 1029 bp, synthetic construct
  misc_feature 1..1029: note = variant of RNA ligase 2 from Escherichia phage RB69 (Bacteriophage RB69)
  source 1..1029: mol_type = other DNA
atgcatcaccatcaccatcacggtggcagcggtatgtttaagaaatattctagtctggaaaaccattacaatagcaaattcattgagaaactctatgctaacggcttaactgatggtgtatgggttgcgcgcgaaaagatccacgggacgaacttttcgctgattatcgagcgtgataatgtaacatgcgccaaacgtacaggcccgattaagcctgcagaagacttctacggttatgaaatcgtcctgaagaaatacgataaagcgattaagacggtgcagaaatttatgtataccgccggcgcggtttcctaccaagtgttcggagaatttgctggcaacggtatctggaaaggtgtcgattatggcgagaaagacttctatgtgtttgatattctgatcaatacggaatcaggagacaacacgtacctgactgattatgaaatgcaggacttctgtaatgaatttgggtttaagatggcaccaatgcttggtcgcggcacattcgatagcctgattatgattccgaacgatttcgattcggttctcatggcttacaatgcaacggcgaaagaggacctggtaaaagcgaacaactgcgtctttgatgccaatgtgatcggtgataacactgctgaaggctatgttcttaaaccgtgtgaacccaaatggttaccgaatgggacgcgtgtggcgatcaaatgcaagaactccaaattcagcgagaagaagaaaagtgacaaaccgatcaagacacaagtcccactgacggaaattgataagaatctgctggacgtattggcctgttacgtcactttaaaccgcgtgaacaacgtgatctctaagattggaacagtgacgccgaaagattttggcaaagtaatgggtctgactgttcaggatattctggaagaaacgtcacgtgagggtattgttctgacgacatcggacaatcctgacctcgtcaagaaagaacttgttcgcatggtgcaggatgtattagaatcggcatggcgcgaactggtgtcg

SEQ ID NO: 286 - protein, 343 aa, synthetic construct
  REGION 1..343: note = variant of RNA ligase 2 from Escherichia phage RB69 (Bacteriophage RB69)
MHHHHHHGGSGMFKKYSSLENHYNSKFIEKLYANGLTDGVWVAREKIHGTNFSLIIERDNVTCAKRTGPIKPAEDFYGYEIVLKKYDKAIKTVQKFMYTAGAVSYQVFGEFAGNGIWKGVDYGEKDFYVFDILINTESGDNTYLTDYEMQDFCNEFGFKMAPMLGRGTFDSLIMIPNDFDSVLMAYNATAKEDLVKANNCVFDANVIGDNTAEGYVLKPCEPKWLPNGTRVAIKCKNSKFSEKKKSDKPIKTQVPLTEIDKNLLDVLACYVTLNRVNNVISKIGTVTPKDFGKVMGLTVQDILEETSREGIVLTTSDNPDLVKKELVRMVQDVLESAWRELVS

SEQ ID NO: 287 - DNA, 1029 bp, synthetic construct
  misc_feature 1..1029: note = variant of RNA ligase 2 from Escherichia phage RB69 (Bacteriophage RB69)
  source 1..1029: mol_type = other DNA
atgcatcaccatcaccatcacggtggcagcggtatgtttaagaaatattctagtctggaaaaccattacaatagcaaattcattgagaaactctatgctaacggcttaactgatggtgtatgggttgcgcgcgaaaagatccacgggacgaacttttcgctgattatcgagcgtgataatgtaacatgcgccaaacgtacaggcccgattaagcctgcagaagacttctacggttatgaaatcgtcctgaagaaatacgataaagcgattaagacggtgcagaaatttatgtataccgccggcgcggtttcctaccaagtgttcggagaatttgctggcaacggtatcactaaaggtgtcgattatggcgagaaagacttctatgtgtttgatattctgatcaatacggaatcaggagacaacacgtacctgactgattatgaaatgcaggacttctgtaatgaatttgggtttaagatggcaccaatgcttggtcgcggcacattcgatagcctgattatgattccgaacgatttcgattcggttctcatggcttacaatgcaacggcgaaagaggacctggtaaaagcgaacaactgcgtctttgatgccaatgtgatcggtgataacactgctgaaggctatgttcttaaaccgtgtgaacccaaatggttaccgaatgggacgcgtgtggcgatcaaatgcaagaactccaaattcagcgagaagaagaaaagtgacaaaccgatcaagacacaagtcccactgacggaaattgataagaatctgctggacgtattggcctgttacgtcactttaaaccgcgtgaacaacgtgatctctaagattggaacagtgacgccgaaagattttggcaaagtaatgggtctgactgttcaggatattctggaagaaacgtcacgtgagggtattgttctgacgacatcggacaatcctgacctcgtcaagaaagaacttgttcgcatggtgcaggatgtattagaatcggcatggcgcgaactggtgtcg

SEQ ID NO: 288 - protein, 343 aa, synthetic construct
  REGION 1..343: note = variant of RNA ligase 2 from Escherichia phage RB69 (Bacteriophage RB69)
MHHHHHHGGSGMFKKYSSLENHYNSKFIEKLYANGLTDGVWVAREKIHGTNFSLIIERDNVTCAKRTGPIKPAEDFYGYEIVLKKYDKAIKTVQKFMYTAGAVSYQVFGEFAGNGITKGVDYGEKDFYVFDILINTESGDNTYLTDYEMQDFCNEFGFKMAPMLGRGTFDSLIMIPNDFDSVLMAYNATAKEDLVKANNCVFDANVIGDNTAEGYVLKPCEPKWLPNGTRVAIKCKNSKFSEKKKSDKPIKTQVPLTEIDKNLLDVLACYVTLNRVNNVISKIGTVTPKDFGKVMGLTVQDILEETSREGIVLTTSDNPDLVKKELVRMVQDVLESAWRELVS

SEQ ID NO: 289 - DNA, 1029 bp, synthetic construct
  misc_feature 1..1029: note = variant of RNA ligase 2 from Escherichia phage RB69 (Bacteriophage RB69)
  source 1..1029: mol_type = other DNA
atgcatcaccatcaccatcacggtggcagcggtatgtttaagaaatattctagtctggaaaaccattacaatagcaaattcattgagaaactctatgctaacggcttaactgatggtgtatgggttgcgcgcgaaaagatccacgggacgaacttttcgctgattatcgagcgtgataatgtaacatgcgccaaacgtacaggcccgattaagcctgcagaagacttctacggttatgaaatcgtcctgaagaaatacgataaagcgattaagacggtgcagaaatttatgtataccgccggcgcggtttcctaccaagtgttcggagaatttgctggcaacggtatccataaaggtgtcgattatggcgagaaagacttctatgtgtttgatattctgatcaatacggaatcaggagacaacacgtacctgactgattatgaaatgcaggacttctgtaatgaatttgggtttaagatggcaccaatgcttggtcgcggcacattcgatagcctgattatgattccgaacgatttcgattcggttctcatggcttacaatgcaacggcgaaagaggacctggtaaaagcgaacaactgcgtctttgatgccaatgtgatcggtgataacactgctgaaggctatgttcttaaaccgtgtgaacccaaatggttaccgaatgggacgcgtgtggcgatcaaatgcaagaactccaaattcagcgagaagaagaaaagtgacaaaccgatcaagacacaagtcccactgacggaaattgataagaatctgctggacgtattggcctgttacgtcactttaaaccgcgtgaacaacgtgatctctaagattggaacagtgacgccgaaagattttggcaaagtaatgggtctgactgttcaggatattctggaagaaacgtcacgtgagggtattgttctgacgacatcggacaatcctgacctcgtcaagaaagaacttgttcgcatggtgcaggatgtattagaatcggcatggcgcgaactggtgtcg

SEQ ID NO: 290 - protein, 343 aa, synthetic construct
  REGION 1..343: note = variant of RNA ligase 2 from Escherichia phage RB69 (Bacteriophage RB69)
MHHHHHHGGSGMFKKYSSLENHYNSKFIEKLYANGLTDGVWVAREKIHGTNFSLIIERDNVTCAKRTGPIKPAEDFYGYEIVLKKYDKAIKTVQKFMYTAGAVSYQVFGEFAGNGIHKGVDYGEKDFYVFDILINTESGDNTYLTDYEMQDFCNEFGFKMAPMLGRGTFDSLIMIPNDFDSVLMAYNATAKEDLVKANNCVFDANVIGDNTAEGYVLKPCEPKWLPNGTRVAIKCKNSKFSEKKKSDKPIKTQVPLTEIDKNLLDVLACYVTLNRVNNVISKIGTVTPKDFGKVMGLTVQDILEETSREGIVLTTSDNPDLVKKELVRMVQDVLESAWRELVS

SEQ ID NO: 291 - DNA, 1029 bp, synthetic construct
  misc_feature 1..1029: note = variant of RNA ligase 2 from Escherichia phage RB69 (Bacteriophage RB69)
  source 1..1029: mol_type = other DNA
atgcatcaccatcaccatcacggtggcagcggtatgtttaagaaatattctagtctggaaaaccattacaatagcaaattcattgagaaactctatgctaacggcttaactgatggtgtatgggttgcgcgcgaaaagatccacgggacgaacttttcgctgattatcgagcgtgataatgtaacatgcgccaaacgtacaggcccgattaagcctgcagaagacttctacggttatgaaatcgtcctgaagaaatacgataaagcgattaagacggtgcagaaatttatgtataccgccggcgcggtttcctaccaagtgttcggagaatttgctggcaacggtatcgcgaaaggtgtcgattatggcgagaaagacttctatgtgtttgatattctgatcaatacggaatcaggagacaacacgtacctgactgattatgaaatgcaggacttctgtaatgaatttgggtttaagatggcaccaatgcttggtcgcggcacattcgatagcctgattatgattccgaacgatttcgattcggttctcatggcttacaatgcaacggcgaaagaggacctggtaaaagcgaacaactgcgtctttgatgccaatgtgatcggtgataacactgctgaaggctatgttcttaaaccgtgtgaacccaaatggttaccgaatgggacgcgtgtggcgatcaaatgcaagaactccaaattcagcgagaagaagaaaagtgacaaaccgatcaagacacaagtcccactgacggaaattgataagaatctgctggacgtattggcctgttacgtcactttaaaccgcgtgaacaacgtgatctctaagattggaacagtgacgccgaaagattttggcaaagtaatgggtctgactgttcaggatattctggaagaaacgtcacgtgagggtattgttctgacgacatcggacaatcctgacctcgtcaagaaagaacttgttcgcatggtgcaggatgtattagaatcggcatggcgcgaactggtgtcg

SEQ ID NO: 292 - protein, 343 aa, synthetic construct
  REGION 1..343: note = variant of RNA ligase 2 from Escherichia phage RB69 (Bacteriophage RB69)
MHHHHHHGGSGMFKKYSSLENHYNSKFIEKLYANGLTDGVWVAREKIHGTNFSLIIERDNVTCAKRTGPIKPAEDFYGYEIVLKKYDKAIKTVQKFMYTAGAVSYQVFGEFAGNGIAKGVDYGEKDFYVFDILINTESGDNTYLTDYEMQDFCNEFGFKMAPMLGRGTFDSLIMIPNDFDSVLMAYNATAKEDLVKANNCVFDANVIGDNTAEGYVLKPCEPKWLPNGTRVAIKCKNSKFSEKKKSDKPIKTQVPLTEIDKNLLDVLACYVTLNRVNNVISKIGTVTPKDFGKVMGLTVQDILEETSREGIVLTTSDNPDLVKKELVRMVQDVLESAWRELVS

SEQ ID NO: 293 - DNA, 1029 bp, synthetic construct
  misc_feature 1..1029: note = variant of RNA ligase 2 from Escherichia phage RB69 (Bacteriophage RB69)
  source 1..1029: mol_type = other DNA
atgcatcaccatcaccatcacggtggcagcggtatgtttaagaaatattctagtctggaaaaccattacaatagcaaattcattgagaaactctatgctaacggcttaactgatggtgtatgggttgcgcgcgaaaagatccacgggacgaacttttcgctgattatcgagcgtgataatgtaacatgcgccaaacgtacaggcccgattaagcctgcagaagacttctacggttatgaaatcgtcctgaagaaatacgataaagcgattaagacggtgcagaaatttatgtataccgccggcgcggtttcctaccaagtgttcggagaatttgctggcaacggtatcatgaaaggtgtcgattatggcgagaaagacttctatgtgtttgatattctgatcaatacggaatcaggagacaacacgtacctgactgattatgaaatgcaggacttctgtaatgaatttgggtttaagatggcaccaatgcttggtcgcggcacattcgatagcctgattatgattccgaacgatttcgattcggttctcatggcttacaatgcaacggcgaaagaggacctggtaaaagcgaacaactgcgtctttgatgccaatgtgatcggtgataacactgctgaaggctatgttcttaaaccgtgtgaacccaaatggttaccgaatgggacgcgtgtggcgatcaaatgcaagaactccaaattcagcgagaagaagaaaagtgacaaaccgatcaagacacaagtcccactgacggaaattgataagaatctgctggacgtattggcctgttacgtcactttaaaccgcgtgaacaacgtgatctctaagattggaacagtgacgccgaaagattttggcaaagtaatgggtctgactgttcaggatattctggaagaaacgtcacgtgagggtattgttctgacgacatcggacaatcctgacctcgtcaagaaagaacttgttcgcatggtgcaggatgtattagaatcggcatggcgcgaactggtgtcg

SEQ ID NO: 294 - protein, 343 aa, synthetic construct
  REGION 1..343: note = variant of RNA ligase 2 from Escherichia phage RB69 (Bacteriophage RB69)
MHHHHHHGGSGMFKKYSSLENHYNSKFIEKLYANGLTDGVWVAREKIHGTNFSLIIERDNVTCAKRTGPIKPAEDFYGYEIVLKKYDKAIKTVQKFMYTAGAVSYQVFGEFAGNGIMKGVDYGEKDFYVFDILINTESGDNTYLTDYEMQDFCNEFGFKMAPMLGRGTFDSLIMIPNDFDSVLMAYNATAKEDLVKANNCVFDANVIGDNTAEGYVLKPCEPKWLPNGTRVAIKCKNSKFSEKKKSDKPIKTQVPLTEIDKNLLDVLACYVTLNRVNNVISKIGTVTPKDFGKVMGLTVQDILEETSREGIVLTTSDNPDLVKKELVRMVQDVLESAWRELVS

SEQ ID NO: 295 - DNA, 1029 bp, synthetic construct
  misc_feature 1..1029: note = variant of RNA ligase 2 from Escherichia phage RB69 (Bacteriophage RB69)
  source 1..1029: mol_type = other DNA
atgcatcaccatcaccatcacggtggcagcggtatgtttaagaaatattctagtctggaaaaccattacaatagcaaattcattgagaaactctatgctaacggcttaactgatggtgtatgggttgcgcgcgaaaagatccacgggacgaacttttcgctgattatcgagcgtgataatgtaacatgcgccaaacgtacaggcccgattaagcctgcagaagacttctacggttatgaaatcgtcctgaagaaatacgataaagcgattaagacggtgcagaaatttatgtataccgccggcgcggtttcctaccaagtgttcggagaatttgctggcaacggtatcgggaaaggtgtcgattatggcgagaaagacttctatgtgtttgatattctgatcaatacggaatcaggagacaacacgtacctgactgattatgaaatgcaggacttctgtaatgaatttgggtttaagatggcaccaatgcttggtcgcggcacattcgatagcctgattatgattccgaacgatttcgattcggttctcatggcttacaatgcaacggcgaaagaggacctggtaaaagcgaacaactgcgtctttgatgccaatgtgatcggtgataacactgctgaaggctatgttcttaaaccgtgtgaacccaaatggttaccgaatgggacgcgtgtggcgatcaaatgcaagaactccaaattcagcgagaagaagaaaagtgacaaaccgatcaagacacaagtcccactgacggaaattgataagaatctgctggacgtattggcctgttacgtcactttaaaccgcgtgaacaacgtgatctctaagattggaacagtgacgccgaaagattttggcaaagtaatgggtctgactgttcaggatattctggaagaaacgtcacgtgagggtattgttctgacgacatcggacaatcctgacctcgtcaagaaagaacttgttcgcatggtgcaggatgtattagaatcggcatggcgcgaactggtgtcg

SEQ ID NO: 296 - protein, 343 aa, synthetic construct
  REGION 1..343: note = variant of RNA ligase 2 from Escherichia phage RB69 (Bacteriophage RB69)
MHHHHHHGGSGMFKKYSSLENHYNSKFIEKLYANGLTDGVWVAREKIHGTNFSLIIERDNVTCAKRTGPIKPAEDFYGYEIVLKKYDKAIKTVQKFMYTAGAVSYQVFGEFAGNGIGKGVDYGEKDFYVFDILINTESGDNTYLTDYEMQDFCNEFGFKMAPMLGRGTFDSLIMIPNDFDSVLMAYNATAKEDLVKANNCVFDANVIGDNTAEGYVLKPCEPKWLPNGTRVAIKCKNSKFSEKKKSDKPIKTQVPLTEIDKNLLDVLACYVTLNRVNNVISKIGTVTPKDFGKVMGLTVQDILEETSREGIVLTTSDNPDLVKKELVRMVQDVLESAWRELVS

SEQ ID NO: 297 - DNA, 1029 bp, synthetic construct
  misc_feature 1..1029: note = variant of RNA ligase 2 from Escherichia phage RB69 (Bacteriophage RB69)
  source 1..1029: mol_type = other DNA
atgcatcaccatcaccatcacggtggcagcggtatgtttaagaaatattctagtctggaaaaccattacaatagcaaattcattgagaaactctatgctaacggcttaactgatggtgtatgggttgcgcgcgaaaagatccacgggacgaacttttcgctgattatcgagcgtgataatgtaacatgcgccaaacgtacaggcccgattaagcctgcagaagacttctacggttatgaaatcgtcctgaagaaatacgataaagcgattaagacggtgcagaaatttatgtataccgccggcgcggtttcctaccaagtgttcggagaatttgctggcaacggtatcattaaaggtgtcgattatggcgagaaagacttctatgtgtttgatattctgatcaatacggaatcaggagacaacacgtacctgactgattatgaaatgcaggacttctgtaatgaatttgggtttaagatggcaccaatgcttggtcgcggcacattcgatagcctgattatgattccgaacgatttcgattcggttctcatggcttacaatgcaacggcgaaagaggacctggtaaaagcgaacaactgcgtctttgatgccaatgtgatcggtgataacactgctgaaggctatgttcttaaaccgtgtgaacccaaatggttaccgaatgggacgcgtgtggcgatcaaatgcaagaactccaaattcagcgagaagaagaaaagtgacaaaccgatcaagacacaagtcccactgacggaaattgataagaatctgctggacgtattggcctgttacgtcactttaaaccgcgtgaacaacgtgatctctaagattggaacagtgacgccgaaagattttggcaaagtaatgggtctgactgttcaggatattctggaagaaacgtcacgtgagggtattgttctgacgacatcggacaatcctgacctcgtcaagaaagaacttgttcgcatggtgcaggatgtattagaatcggcatggcgcgaactggtgtcg

SEQ ID NO: 298 - protein, 343 aa, synthetic construct
  REGION 1..343: note = variant of RNA ligase 2 from Escherichia phage RB69 (Bacteriophage RB69)
MHHHHHHGGSGMFKKYSSLENHYNSKFIEKLYANGLTDGVWVAREKIHGTNFSLIIERDNVTCAKRTGPIKPAEDFYGYEIVLKKYDKAIKTVQKFMYTAGAVSYQVFGEFAGNGIIKGVDYGEKDFYVFDILINTESGDNTYLTDYEMQDFCNEFGFKMAPMLGRGTFDSLIMIPNDFDSVLMAYNATAKEDLVKANNCVFDANVIGDNTAEGYVLKPCEPKWLPNGTRVAIKCKNSKFSEKKKSDKPIKTQVPLTEIDKNLLDVLACYVTLNRVNNVISKIGTVTPKDFGKVMGLTVQDILEETSREGIVLTTSDNPDLVKKELVRMVQDVLESAWRELVS

SEQ ID NO: 299 - DNA, 1029 bp, synthetic construct
  misc_feature 1..1029: note = variant of RNA ligase 2 from Escherichia phage RB69 (Bacteriophage RB69)
  source 1..1029: mol_type = other DNA
atgcatcaccatcaccatcacggtggcagcggtatgtttaagaaatattctagtctggaaaaccattacaatagcaaattcattgagaaactctatgctaacggcttaactgatggtgtatgggttgcgcgcgaaaagatccacgggacgaacttttcgctgattatcgagcgtgataatgtaacatgcgccaaacgtacaggcccgattaagcctgcagaagacttctacggttatgaaatcgtcctgaagaaatacgataaagcgattaagacggtgcagaaatttatgtataccgccggcgcggtttcctaccaagtgttcggagaatttgctggcaacggtatcaagaaaggtgtcgattatggcgagaaagacttctatgtgtttgatattctgatcaatacggaatcaggagacaacacgtacctgactgattatgaaatgcaggacttctgtaatgaatttgggtttaagatggcaccaatgcttggtcgcggcacattcgatagcctgattatgattccgaacgatttcgattcggttctcatggcttacaatgcaacggcgaaagaggacctggtaaaagcgaacaactgcgtctttgatgccaatgtgatcggtgataacactgctgaaggctatgttcttaaaccgtgtgaacccaaatggttaccgaatgggacgcgtgtggcgatcaaatgcaagaactccaaattcagcgagaagaagaaaagtgacaaaccgatcaagacacaagtcccactgacggaaattgataagaatctgctggacgtattggcctgttacgtcactttaaaccgcgtgaacaacgtgatctctaagattggaacagtgacgccgaaagattttggcaaagtaatgggtctgactgttcaggatattctggaagaaacgtcacgtgagggtattgttctgacgacatcggacaatcctgacctcgtcaagaaagaacttgttcgcatggtgcaggatgtattagaatcggcatggcgcgaactggtgtcg

SEQ ID NO: 300 - protein, 343 aa, synthetic construct
  REGION 1..343: note = variant of RNA ligase 2 from Escherichia phage RB69 (Bacteriophage RB69)
MHHHHHHGGSGMFKKYSSLENHYNSKFIEKLYANGLTDGVWVAREKIHGTNFSLIIERDNVTCAKRTGPIKPAEDFYGYEIVLKKYDKAIKTVQKFMYTAGAVSYQVFGEFAGNGIKKGVDYGEKDFYVFDILINTESGDNTYLTDYEMQDFCNEFGFKMAPMLGRGTFDSLIMIPNDFDSVLMAYNATAKEDLVKANNCVFDANVIGDNTAEGYVLKPCEPKWLPNGTRVAIKCKNSKFSEKKKSDKPIKTQVPLTEIDKNLLDVLACYVTLNRVNNVISKIGTVTPKDFGKVMGLTVQDILEETSREGIVLTTSDNPDLVKKELVRMVQDVLESAWRELVS

SEQ ID NO: 301 - DNA, 1029 bp, synthetic construct
  misc_feature 1..1029: note = variant of RNA ligase 2 from Escherichia phage RB69 (Bacteriophage RB69)
  source 1..1029: mol_type = other DNA
atgcatcaccatcaccatcacggtggcagcggtatgtttaagaaatattctagtctggaaaaccattacaatagcaaattcattgagaaactctatgctaacggcttaactgatggtgtatgggttgcgcgcgaaaagatccacgggacgaacttttcgctgattatcgagcgtgataatgtaacatgcgccaaacgtacaggcccgattaagcctgcagaagacttctacggttatgaaatcgtcctgaagaaatacgataaagcgattaagacggtgcagaaatttatgtataccgccggcgcggtttcctaccaagtgttcggagaatttgctggcaacggtatccgtaaaggtgtcgattatggcgagaaagacttctatgtgtttgatattctgatcaatacggaatcaggagacaacacgtacctgactgattatgaaatgcaggacttctgtaatgaatttgggtttaagatggcaccaatgcttggtcgcggcacattcgatagcctgattatgattccgaacgatttcgattcggttctcatggcttacaatgcaacggcgaaagaggacctggtaaaagcgaacaactgcgtctttgatgccaatgtgatcggtgataacactgctgaaggctatgttcttaaaccgtgtgaacccaaatggttaccgaatgggacgcgtgtggcgatcaaatgcaagaactccaaattcagcgagaagaagaaaagtgacaaaccgatcaagacacaagtcccactgacggaaattgataagaatctgctggacgtattggcctgttacgtcactttaaaccgcgtgaacaacgtgatctctaagattggaacagtgacgccgaaagattttggcaaagtaatgggtctgactgttcaggatattctggaagaaacgtcacgtgagggtattgttctgacgacatcggacaatcctgacctcgtcaagaaagaacttgttcgcatggtgcaggatgtattagaatcggcatggcgcgaactggtgtcg

SEQ ID NO: 302 - protein, 343 aa, synthetic construct
  REGION 1..343: note = variant of RNA ligase 2 from Escherichia phage RB69 (Bacteriophage RB69)
MHHHHHHGGSGMFKKYSSLENHYNSKFIEKLYANGLTDGVWVAREKIHGTNFSLIIERDNVTCAKRTGPIKPAEDFYGYEIVLKKYDKAIKTVQKFMYTAGAVSYQVFGEFAGNGIRKGVDYGEKDFYVFDILINTESGDNTYLTDYEMQDFCNEFGFKMAPMLGRGTFDSLIMIPNDFDSVLMAYNATAKEDLVKANNCVFDANVIGDNTAEGYVLKPCEPKWLPNGTRVAIKCKNSKFSEKKKSDKPIKTQVPLTEIDKNLLDVLACYVTLNRVNNVISKIGTVTPKDFGKVMGLTVQDILEETSREGIVLTTSDNPDLVKKELVRMVQDVLESAWRELVS

SEQ ID NO: 303 - DNA, 1029 bp, synthetic construct
  misc_feature 1..1029: note = variant of RNA ligase 2 from Escherichia phage RB69 (Bacteriophage RB69)
  source 1..1029: mol_type = other DNA
atgcatcaccatcaccatcacggtggcagcggtatgtttaagaaatattctagtctggaaaaccattacaatagcaaattcattgagaaactctatgctaacggcttaactgatggtgtatgggttgcgcgcgaaaagatccacgggacgaacttttcgctgattatcgagcgtgataatgtaacatgcgccaaacgtacaggcccgattaagcctgcagaagacttctacggttatgaaatcgtcctgaagaaatacgataaagcgattaagacggtgcagaaatttatgtataccgccggcgcggtttcctaccaagtgttcggagaatttgctggcaacggtatctctaaaggtgtcgattatggcgagaaagacttctatgtgtttgatattctgatcaatacggaatcaggagacaacacgtacctgactgattatgaaatgcaggacttctgtaatgaatttgggtttaagatggcaccaatgcttggtcgcggcacattcgatagcctgattatgattccgaacgatttcgattcggttctcatggcttacaatgcaacggcgaaagaggacctggtaaaagcgaacaactgcgtctttgatgccaatgtgatcggtgataacactgctgaaggctatgttcttaaaccgtgtgaacccaaatggttaccgaatgggacgcgtgtggcgatcaaatgcaagaactccaaattcagcgagaagaagaaaagtgacaaaccgatcaagacacaagtcccactgacggaaattgataagaatctgctggacgtattggcctgttacgtcactttaaaccgcgtgaacaacgtgatctctaagattggaacagtgacgccgaaagattttggcaaagtaatgggtctgactgttcaggatattctggaagaaacgtcacgtgagggtattgttctgacgacatcggacaatcctgacctcgtcaagaaagaacttgttcgcatggtgcaggatgtattagaatcggcatggcgcgaactggtgtcg

SEQ ID NO: 304 - protein, 343 aa, synthetic construct
  REGION 1..343: note = variant of RNA ligase 2 from Escherichia phage RB69 (Bacteriophage RB69)
MHHHHHHGGSGMFKKYSSLENHYNSKFIEKLYANGLTDGVWVAREKIHGTNFSLIIERDNVTCAKRTGPIKPAEDFYGYEIVLKKYDKAIKTVQKFMYTAGAVSYQVFGEFAGNGISKGVDYGEKDFYVFDILINTESGDNTYLTDYEMQDFCNEFGFKMAPMLGRGTFDSLIMIPNDFDSVLMAYNATAKEDLVKANNCVFDANVIGDNTAEGYVLKPCEPKWLPNGTRVAIKCKNSKFSEKKKSDKPIKTQVPLTEIDKNLLDVLACYVTLNRVNNVISKIGTVTPKDFGKVMGLTVQDILEETSREGIVLTTSDNPDLVKKELVRMVQDVLESAWRELVS

SEQ ID NO: 305 - DNA, 1029 bp, synthetic construct
  misc_feature 1..1029: note = variant of RNA ligase 2 from Escherichia phage RB69 (Bacteriophage RB69)
  source 1..1029: mol_type = other DNA
atgcatcaccatcaccatcacggtggcagcggtatgtttaagaaatattctagtctggaaaaccattacaatagcaaattcattgagaaactctatgctaacggcttaactgatggtgtatgggttgcgcgcgaaaagatccacgggacgaacttttcgctgattatcgagcgtgataatgtaacatgcgccaaacgtacaggcccgattaagcctgcagaagacttctacggttatgaaatcgtcctgaagaaatacgataaagcgattaagacggtgcagaaatttatgtataccgccggcgcggtttcctaccaagtgttcggagaatttgctggcaacggtatcgtgaaaggtgtcgattatggcgagaaagacttctatgtgtttgatattctgatcaatacggaatcaggagacaacacgtacctgactgattatgaaatgcaggacttctgtaatgaatttgggtttaagatggcaccaatgcttggtcgcggcacattcgatagcctgattatgattccgaacgatttcgattcggttctcatggcttacaatgcaacggcgaaagaggacctggtaaaagcgaacaactgcgtctttgatgccaatgtgatcggtgataacactgctgaaggctatgttcttaaaccgtgtgaacccaaatggttaccgaatgggacgcgtgtggcgatcaaatgcaagaactccaaattcagcgagaagaagaaaagtgacaaaccgatcaagacacaagtcccactgacggaaattgataagaatctgctggacgtattggcctgttacgtcactttaaaccgcgtgaacaacgtgatctctaagattggaacagtgacgccgaaagattttggcaaagtaatgggtctgactgttcaggatattctggaagaaacgtcacgtgagggtattgttctgacgacatcggacaatcctgacctcgtcaagaaagaacttgttcgcatggtgcaggatgtattagaatcggcatggcgcgaactggtgtcg

SEQ ID NO: 306 - protein, 343 aa, synthetic construct
  REGION 1..343: note = variant of RNA ligase 2 from Escherichia phage RB69 (Bacteriophage RB69)
MHHHHHHGGSGMFKKYSSLENHYNSKFIEKLYANGLTDGVWVAREKIHGTNFSLIIERDNVTCAKRTGPIKPAEDFYGYEIVLKKYDKAIKTVQKFMYTAGAVSYQVFGEFAGNGIVKGVDYGEKDFYVFDILINTESGDNTYLTDYEMQDFCNEFGFKMAPMLGRGTFDSLIMIPNDFDSVLMAYNATAKEDLVKANNCVFDANVIGDNTAEGYVLKPCEPKWLPNGTRVAIKCKNSKFSEKKKSDKPIKTQVPLTEIDKNLLDVLACYVTLNRVNNVISKIGTVTPKDFGKVMGLTVQDILEETSREGIVLTTSDNPDLVKKELVRMVQDVLESAWRELVS

SEQ ID NO: 307 - DNA, 1029 bp, synthetic construct
  misc_feature 1..1029: note = variant of RNA ligase 2 from Escherichia phage RB69 (Bacteriophage RB69)
  source 1..1029: mol_type = other DNA
atgcatcaccatcaccatcacggtggcagcggtatgtttaagaaatattctagtctggaaaaccattacaatagcaaattcattgagaaactctatgctaacggcttaactgatggtgtatgggttgcgcgcgaaaagatccacgggacgaacttttcgctgattatcgagcgtgataatgtaacatgcgccaaacgtacaggcccgattaagcctgcagaagacttctacggttatgaaatcgtcctgaagaaatacgataaagcgattaagacggtgcagaaatttatgtataccgccggcgcggtttcctaccaagtgttcggagaatttgctggcaacggtatctttaaaggtgtcgattatggcgagaaagacttctatgtgtttgatattctgatcaatacggaatcaggagacaacacgtacctgactgattatgaaatgcaggacttctgtaatgaatttgggtttaagatggcaccaatgcttggtcgcggcacattcgatagcctgattatgattccgaacgatttcgattcggttctcatggcttacaatgcaacggcgaaagaggacctggtaaaagcgaacaactgcgtctttgatgccaatgtgatcggtgataacactgctgaaggctatgttcttaaaccgtgtgaacccaaatggttaccgaatgggacgcgtgtggcgatcaaatgcaagaactccaaattcagcgagaagaagaaaagtgacaaaccgatcaagacacaagtcccactgacggaaattgataagaatctgctggacgtattggcctgttacgtcactttaaaccgcgtgaacaacgtgatctctaagattggaacagtgacgccgaaagattttggcaaagtaatgggtctgactgttcaggatattctggaagaaacgtcacgtgagggtattgttctgacgacatcggacaatcctgacctcgtcaagaaagaacttgttcgcatggtgcaggatgtattagaatcggcatggcgcgaactggtgtcg

SEQ ID NO: 308 - protein, 343 aa, synthetic construct
  REGION 1..343: note = variant of RNA ligase 2 from Escherichia phage RB69 (Bacteriophage RB69)
MHHHHHHGGSGMFKKYSSLENHYNSKFIEKLYANGLTDGVWVAREKIHGTNFSLIIERDNVTCAKRTGPIKPAEDFYGYEIVLKKYDKAIKTVQKFMYTAGAVSYQVFGEFAGNGIFKGVDYGEKDFYVFDILINTESGDNTYLTDYEMQDFCNEFGFKMAPMLGRGTFDSLIMIPNDFDSVLMAYNATAKEDLVKANNCVFDANVIGDNTAEGYVLKPCEPKWLPNGTRVAIKCKNSKFSEKKKSDKPIKTQVPLTEIDKNLLDVLACYVTLNRVNNVISKIGTVTPKDFGKVMGLTVQDILEETSREGIVLTTSDNPDLVKKELVRMVQDVLESAWRELVS

SEQ ID NO: 309 - DNA, 1029 bp, synthetic construct
  misc_feature 1..1029: note = variant of RNA ligase 2 from Escherichia phage RB69 (Bacteriophage RB69)
  source 1..1029: mol_type = other DNA
atgcatcaccatcaccatcacggtggcagcggtatgtttaagaaatattctagtctggaaaaccattacaatagcaaattcattgagaaactctatgctaacggcttaactgatggtgtatgggttgcgcgcgaaaagatccacgggacgaacttttcgctgattatcgagcgtgataatgtaacatgcgccaaacgtacaggcccgattaagcctgcagaagacttctacggttatgaaatcgtcctgaagaaatacgataaagcgattaagacggtgcagaaatttatgtataccgccggcgcggtttcctaccaagtgttcggagaatttgctggcaacggtatctgtaaaggtgtcgattatggcgagaaagacttctatgtgtttgatattctgatcaatacggaatcaggagacaacacgtacctgactgattatgaaatgcaggacttctgtaatgaatttgggtttaagatggcaccaatgcttggtcgcggcacattcgatagcctgattatgattccgaacgatttcgattcggttctcatggcttacaatgcaacggcgaaagaggacctggtaaaagcgaacaactgcgtctttgatgccaatgtgatcggtgataacactgctgaaggctatgttcttaaaccgtgtgaacccaaatggttaccgaatgggacgcgtgtggcgatcaaatgcaagaactccaaattcagcgagaagaagaaaagtgacaaaccgatcaagacacaagtcccactgacggaaattgataagaatctgctggacgtattggcctgttacgtcactttaaaccgcgtgaacaacgtgatctctaagattggaacagtgacgccgaaagattttggcaaagtaatgggtctgactgttcaggatattctggaagaaacgtcacgtgagggtattgttctgacgacatcggacaatcctgacctcgtcaagaaagaacttgttcgcatggtgcaggatgtattagaatcggcatggcgcgaactggtgtcg

SEQ ID NO: 310 - protein, 343 aa, synthetic construct
  REGION 1..343: note = variant of RNA ligase 2 from Escherichia phage RB69 (Bacteriophage RB69)
MHHHHHHGGSGMFKKYSSLENHYNSKFIEKLYANGLTDGVWVAREKIHGTNFSLIIERDNVTCAKRTGPIKPAEDFYGYEIVLKKYDKAIKTVQKFMYTAGAVSYQVFGEFAGNGICKGVDYGEKDFYVFDILINTESGDNTYLTDYEMQDFCNEFGFKMAPMLGRGTFDSLIMIPNDFDSVLMAYNATAKEDLVKANNCVFDANVIGDNTAEGYVLKPCEPKWLPNGTRVAIKCKNSKFSEKKKSDKPIKTQVPLTEIDKNLLDVLACYVTLNRVNNVISKIGTVTPKDFGKVMGLTVQDILEETSREGIVLTTSDNPDLVKKELVRMVQDVLESAWRELVS

SEQ ID NO: 311 - DNA, 1029 bp, synthetic construct
  misc_feature 1..1029: note = variant of RNA ligase 2 from Escherichia phage RB69 (Bacteriophage RB69)
  source 1..1029: mol_type = other DNA
atgcatcaccatcaccatcacggtggcagcggtatgtttaagaaatattctagtctggaaaaccattacaatagcaaattcattgagaaactctatgctaacggcttaactgatggtgtatgggttgcgcgcgaaaagatccacgggacgaacttttcgctgattatcgagcgtgataatgtaacatgcgccaaacgtacaggcccgattaagcctgcagaagacttctacggttatgaaatcgtcctgaagaaatacgataaagcgattaagacggtgcagaaatttatgtataccgccggcgcggtttcctaccaagtgttcggagaatttgctggcaacggtatcctgaaaggtgtcgattatggcgagaaagacttctatgtgtttgatattctgatcaatacggaatcaggagacaacacgtacctgactgattatgaaatgcaggacttctgtaatgaattcgggtttaagatggcaccaatgcttggtcgcggcacattcgatagcctgattatgattccgaacgatttcgattcggttctcatggcttacaatgcaacggcgaaagaggacctggtaaaagcgaacaactgcgtctttgatgccaatgtgatcggtgataacactgctgaaggctatgttcttaaaccgtgtgaacccaaatggttaccgaatgggacgcgtgtggcgatcaaatgcaagaactccaaattcagcgagaagaagaaaagtgacaaaccgatcaagacacaagtcccactgacggaaattgataagaatctgctggacgtattggcctgttacgtcactttaaaccgcgtgaacaacgtgatctctaagattggaacagtgacgccgaaagattttggcaaagtaatgggtctgactgttcaggatattctggaagaaacgtcacgtgagggtattgttctgacgacatcggacaatcctgacctcgtcaagaaagaacttgttcgcatggtgcaggatgtattagaatcggcatggcgcgaactggtgtcg

SEQ ID NO: 312 - protein, 343 aa, synthetic construct
  REGION 1..343: note = variant of RNA ligase 2 from Escherichia phage RB69 (Bacteriophage RB69)
MHHHHHHGGSGMFKKYSSLENHYNSKFIEKLYANGLTDGVWVAREKIHGTNFSLIIERDNVTCAKRTGPIKPAEDFYGYEIVLKKYDKAIKTVQKFMYTAGAVSYQVFGEFAGNGILKGVDYGEKDFYVFDILINTESGDNTYLTDYEMQDFCNEFGFKMAPMLGRGTFDSLIMIPNDFDSVLMAYNATAKEDLVKANNCVFDANVIGDNTAEGYVLKPCEPKWLPNGTRVAIKCKNSKFSEKKKSDKPIKTQVPLTEIDKNLLDVLACYVTLNRVNNVISKIGTVTPKDFGKVMGLTVQDILEETSREGIVLTTSDNPDLVKKELVRMVQDVLESAWRELVS

SEQ ID NO: 313 - DNA, 1029 bp, synthetic construct
  misc_feature 1..1029: note = variant of RNA ligase 2 from Escherichia phage RB69 (Bacteriophage RB69)
  source 1..1029: mol_type = other DNA
atgcatcaccatcaccatcacggtggcagcggtatgtttaagaaatattctagtctggaaaaccattacaatagcaaattcattgagaaactctatgctaacggcttaactgatggtgtatgggttgcgcgcgaaaagatccacgggacgaacttttcgctgattatcgagcgtgataatgtaacatgcgccaaacgtacaggcccgattaagcctgcagaagacttctacggttatgaaatcgtcctgaagaaatacgataaagcgattaagacggtgcagaaatttatgtataccgccggcgcggtttcctaccaagtgttcggagaatttgctggcaacggtatctggaaaggtgtcgattatggcgagaaagacttctatgtgtttgatattctgatcaatacggaatcaggagacaacacgtacctgactgattatgaaatgcaggacttctgtaatgaatttgggtttaagatggcaccaatgcttggtcgcggcacattcgatagcctgattatgattccgaacgatttcgattcggttctcatggcttacaatgcaacggcgaaagaggacctggtaaaagcgaacaactgcgtctttgatgccaatgtgatcggtgataacactgctgaaggctatgttcttaaaccgtgtgaacccaaatggttaccgaatgggacgcgtgtggcgatcaaatgcaagaactccaaattcagcgagaagaagaaaagtgacaaaccgatcaagacacaagtcccactgacggaaattgataagaatctgctggacgtattggcctgttacgtcactttaaaccgcgtgaacaacgtgatctctaagattggaacagtgacgccgaaagattttggcaaagtaatggagctgactgttcaggatattctggaagaaacgtcacgtgagggtattgttctgacgacatcggacaatcctgacctcgtcaagaaagaacttgttcgcatggtgcaggatgtattagaatcggcatggcgcgaactggtgtcg

SEQ ID NO: 314 - protein, 343 aa, synthetic construct
  REGION 1..343: note = variant of RNA ligase 2 from Escherichia phage RB69 (Bacteriophage RB69)
MHHHHHHGGSGMFKKYSSLENHYNSKFIEKLYANGLTDGVWVAREKIHGTNFSLIIERDNVTCAKRTGPIKPAEDFYGYEIVLKKYDKAIKTVQKFMYTAGAVSYQVFGEFAGNGIWKGVDYGEKDFYVFDILINTESGDNTYLTDYEMQDFCNEFGFKMAPMLGRGTFDSLIMIPNDFDSVLMAYNATAKEDLVKANNCVFDANVIGDNTAEGYVLKPCEPKWLPNGTRVAIKCKNSKFSEKKKSDKPIKTQVPLTEIDKNLLDVLACYVTLNRVNNVISKIGTVTPKDFGKVMELTVQDILEETSREGIVLTTSDNPDLVKKELVRMVQDVLESAWRELVS

SEQ ID NO: 315 - DNA, 1029 bp, synthetic construct
  misc_feature 1..1029: note = variant of RNA ligase 2 from Escherichia phage RB69 (Bacteriophage RB69)
  source 1..1029: mol_type = other DNA
atgcatcaccatcaccatcacggtggcagcggtatgtttaagaaatattctagtctggaaaaccattacaatagcaaattcattgagaaactctatgctaacggcttaactgatggtgtatgggttgcgcgcgaaaagatccacgggacgaacttttcgctgattatcgagcgtgataatgtaacatgcgccaaacgtacaggcccgattaagcctgcagaagacttctacggttatgaaatcgtcctgaagaaatacgataaagcgattaagacggtgcagaaatttatgtataccgccggcgcggtttcctaccaagtgttcggagaatttgctggcgtgggtatcaagaaaggtgtcgattatggcgagaaagacttctatgtgtttgatattctgatcaatacggaatcaggagacaacacgtacctgactgattatgaaatgcaggacttctgtaatgaatttgggtttaagatggcaccaatgcttggtcgcggcacattcgatagcctgattatgattccgaacgatttcgattcggttctcatggcttacaatgcaacggcgaaagaggacctggtaaaagcgaacaactgcgtctttgatgccaatgtgatcggtgataacactgctgaaggctatgttcttaaaccgtgtgaacccaaatggttaccgaatgggacgcgtgtggcgatcaaatgcaagaactccaaattcagcgagaagaagaaaagtgacaaaccgatcaagacacaagtcccactgacggaaattgataagaatctgctggacgtattggcctgttacgtcactttaaaccgcgtgaacaacgtgatctctaagattggaacagtgacgccgaaagattttggcaaagtaatgggtctgactgttcaggatattctggaagaaacgtcacgtgagggtattgttctgacgacatcggacaatcctgacctcgtcaagaaagaacttgttcgcatggtgcaggatgtattagaatcggcatggcgcgaactggtgtcg

SEQ ID NO: 316 - protein, 343 aa, synthetic construct
  REGION 1..343: note = variant of RNA ligase 2 from Escherichia phage RB69 (Bacteriophage RB69)
MHHHHHHGGSGMFKKYSSLENHYNSKFIEKLYANGLTDGVWVAREKIHGTNFSLIIERDNVTCAKRTGPIKPAEDFYGYEIVLKKYDKAIKTVQKFMYTAGAVSYQVFGEFAGVGIKKGVDYGEKDFYVFDILINTESGDNTYLTDYEMQDFCNEFGFKMAPMLGRGTFDSLIMIPNDFDSVLMAYNATAKEDLVKANNCVFDANVIGDNTAEGYVLKPCEPKWLPNGTRVAIKCKNSKFSEKKKSDKPIKTQVPLTEIDKNLLDVLACYVTLNRVNNVISKIGTVTPKDFGKVMGLTVQDILEETSREGIVLTTSDNPDLVKKELVRMVQDVLESAWRELVS

SEQ ID NO: 317 - DNA, 1029 bp, synthetic construct
  misc_feature 1..1029: note = variant of RNA ligase 2 from Escherichia phage RB69 (Bacteriophage RB69)
  source 1..1029: mol_type = other DNA
atgcatcaccatcaccatcacggtggcagcggtatgtttaagaaatattctagtctggaaaaccattacaatagctctttcattgagaaactctatgctaacggcttaactgatggtgtatgggttgcgcgcgaaaagatccacgggacgaacttttcgctgattatcgagcgtgataatgtaacatgcgccaaacgtacaggcccgattaagcctgcagaagacttctacggttatgaaatcgtcctgaagaaatacgataaagcgattaagacggtgcagaaatttatgtataccgccggcgcggtttcctaccaagtgttcggagaatttgctggcaacggtatctggaaaggtgtcgattatggcgagaaagacttctatgtgtttgatattctgatcaatacggaatcaggagacaacacgtacctgactgattatgaaatgcaggacttctgtaatgaatttgggtttaagatggcaccaatgcttggtcgcggcacattcgatagcctgattatgattccgaacgatttcgattcggttctcatggcttacaatgcaacggcgaaagaggacctggtaaaagcgaacaactgcgtctttgatgccaatgtgatcggtgataacactgctgaaggctatgttcttaaaccgtgtgaacccaaatggttaccgaatgggacgcgtgtggcgatcaaatgcaagaactccaaattcagcgagaagaagaaaagtgacaaaccgatcaagacacaagtcccactgacggaaattgataagaatctgctggacgtattggcctgttacgtcactttaaaccgcgtgaacaacgtgatctctaagattggaacagtgacgccgaaagattttggcaaagtaatgggtctgactgttcaggatattctggaagaaacgtcacgtgagggtattgttctgacgacatcggacaatcctgacctcgtcaagaaagaacttgttcgcatggtgcaggatgtattagaatcggcatggcgcgaactggtgtcg

SEQ ID NO: 318 - protein, 343 aa, synthetic construct
  REGION 1..343: note = variant of RNA ligase 2 from Escherichia phage RB69 (Bacteriophage RB69)
MHHHHHHGGSGMFKKYSSLENHYNSSFIEKLYANGLTDGVWVAREKIHGTNFSLIIERDNVTCAKRTGPIKPAEDFYGYEIVLKKYDKAIKTVQKFMYTAGAVSYQVFGEFAGNGIWKGVDYGEKDFYVFDILINTESGDNTYLTDYEMQDFCNEFGFKMAPMLGRGTFDSLIMIPNDFDSVLMAYNATAKEDLVKANNCVFDANVIGDNTAEGYVLKPCEPKWLPNGTRVAIKCKNSKFSEKKKSDKPIKTQVPLTEIDKNLLDVLACYVTLNRVNNVISKIGTVTPKDFGKVMGLTVQDILEETSREGIVLTTSDNPDLVKKELVRMVQDVLESAWRELVS

SEQ ID NO: 319 - DNA, 1029 bp, synthetic construct
  misc_feature 1..1029: note = variant of RNA ligase 2 from Escherichia phage RB69 (Bacteriophage RB69)
  source 1..1029: mol_type = other DNA
atgcatcaccatcaccatcacggtggcagcggtatgtttaagaaatattctagtctggaaaaccattacaatagcaaattcattgagtgtctctatgctaacggcttaactgatggtgtatgggttgcgcgcgaaaagatccacgggacgaacttttcgctgattatcgagcgtgataatgtaacatgcgccaaacgtacaggcccgattaagcctgcagaagacttctacggttatgaaatcgtcctgaagaaatacgataaagcgattaagacggtgcagaaatttatgtataccgccggcgcggtttcctaccaagtgttcggagaatttgctggcaacggtatctggaaaggtgtcgattatggcgagaaagacttctatgtgtttgatattctgatcaatacggaatcaggagacaacacgtacctgactgattatgaaatgcaggacttctgtaatgaatttgggtttaagatggcaccaatgcttggtcgcggcacattcgatagcctgattatgattccgaacgatttcgattcggttctcatggcttacaatgcaacggcgaaagaggacctggtaaaagcgaacaactgcgtctttgatgccaatgtgatcggtgataacactgctgaaggctatgttcttaaaccgtgtgaacccaaatggttaccgaatgggacgcgtgtggcgatcaaatgcaagaactccaaattcagcgagaagaagaaaagtgacaaaccgatcaagacacaagtcccactgacggaaattgataagaatctgctggacgtattggcctgttacgtcactttaaaccgcgtgaacaacgtgatctctaagattggaacagtgacgccgaaagattttggcaaagtaatgggtctgactgttcaggatattctggaagaaacgtcacgtgagggtattgttctgacgacatcggacaatcctgacctcgtcaagaaagaacttgttcgcatggtgcaggatgtattagaatcggcatggcgcgaactggtgtcg

SEQ ID NO: 320 - protein, 343 aa, synthetic construct
  REGION 1..343: note = variant of RNA ligase 2 from Escherichia phage RB69 (Bacteriophage RB69)
MHHHHHHGGSGMFKKYSSLENHYNSKFIECLYANGLTDGVWVAREKIHGTNFSLIIERDNVTCAKRTGPIKPAEDFYGYEIVLKKYDKAIKTVQKFMYTAGAVSYQVFGEFAGNGIWKGVDYGEKDFYVFDILINTESGDNTYLTDYEMQDFCNEFGFKMAPMLGRGTFDSLIMIPNDFDSVLMAYNATAKEDLVKANNCVFDANVIGDNTAEGYVLKPCEPKWLPNGTRVAIKCKNSKFSEKKKSDKPIKTQVPLTEIDKNLLDVLACYVTLNRVNNVISKIGTVTPKDFGKVMGLTVQDILEETSREGIVLTTSDNPDLVKKELVRMVQDVLESAWRELVS

SEQ ID NO: 321 - DNA, 1029 bp, synthetic construct
  misc_feature 1..1029: note = variant of RNA ligase 2 from Escherichia phage RB69 (Bacteriophage RB69)
  source 1..1029: mol_type = other DNA
atgcatcaccatcaccatcacggtggcagcggtatgtttaagaaatattctagtctggaaaaccattacaatagcaaattcattgagaaactctatgctaacggcttaactgatggtgtatgggttgcgcgcgaaaagatccacgggacgaacttttcgctgattatcgagcgtgataatgtaacatgcgccaaacgtacaggcccgattaagcctgcagaagacttctacggttatgaaatcgtcctgaagaaatacgataaagcgattaagacggtgcagaaatttatgtataccgccggcgcggtttcctaccaagtgttcggagaatttgctggcaacggtatcaaggggggtgtcgattatggcgagaaagacttctatgtgtttgatattctgatcaatacggaatcaggagacaacacgtacctgactgattatgaaatgcaggacttctgtaatgaatttgggtttaagatggcaccaatgcttggtcgcggcacattcgatagcctgattatgattccgaacgatttcgattcggttctcatggcttacaatgcaacggcgaaagaggacctggtaaaagcgaacaactgcgtctttgatgccaatgtgatcggtgataacactgctgaaggctatgttcttaaaccgtgtgaacccaaatggttaccgaatgggacgcgtgtggcgatcaaatgcaagaactccaaattcagcgagaagaagaaaagtgacaaaccgatcaagacacaagtcccactgacggaaattgataagaatctgctggacgtattggcctgttacgtcactttaaaccgcgtgaacaacgtgatctctaagattggaacagtgacgccgaaagattttggcaaagtaatgggtctgactgttcaggatattctggaagaaacgtcacgtgagggtattgttctgacgacatcggacaatcctgacctcgtcaagaaagaacttgttcgcatggtgcaggatgtattagaatcggcatggcgcgaactggtgtcg

SEQ ID NO: 322 - protein, 343 aa, synthetic construct
  REGION 1..343: note = variant of RNA ligase 2 from Escherichia phage RB69 (Bacteriophage RB69)
MHHHHHHGGSGMFKKYSSLENHYNSKFIEKLYANGLTDGVWVAREKIHGTNFSLIIERDNVTCAKRTGPIKPAEDFYGYEIVLKKYDKAIKTVQKFMYTAGAVSYQVFGEFAGNGIKGGVDYGEKDFYVFDILINTESGDNTYLTDYEMQDFCNEFGFKMAPMLGRGTFDSLIMIPNDFDSVLMAYNATAKEDLVKANNCVFDANVIGDNTAEGYVLKPCEPKWLPNGTRVAIKCKNSKFSEKKKSDKPIKTQVPLTEIDKNLLDVLACYVTLNRVNNVISKIGTVTPKDFGKVMGLTVQDILEETSREGIVLTTSDNPDLVKKELVRMVQDVLESAWRELVS

SEQ ID NO: 323 - DNA, 1029 bp, synthetic construct
  misc_feature 1..1029: note = variant of RNA ligase 2 from Escherichia phage RB69 (Bacteriophage RB69)
  source 1..1029: mol_type = other DNA
atgcatcaccatcaccatcacggtggcagcggtatgtttaagaaatattctagtctggaaaaccattacaatagcaaattcattgagaaactctatgctaacggcttaactgatggtgtatgggttgcgcgcgaaaagatccacgggacgaacttttcgctgattatcgagcgtgataatgtaacatgcgccaaacgtacaggcccgattaagcctgcagaagacttctacggttatgaaatcgtcctgaagaaatacgataaagcgattaagacggtgcagaaatttatgtataccgccggcgcggtttcctaccaagtgttcggagaatttgctggcccgggtatcaagaaaggtgtcgattatggcgagaaagacttctatgtgtttgatattctgatcaatacggaatcaggagacaacacgtacctgactgattatgaaatgcaggacttctgtaatgaatttgggtttaagatggcaccaatgcttggtcgcggcacattcgatagcctgattatgattccgaacgatttcgattcggttctcatggcttacaatgcaacggcgaaagaggacctggtaaaagcgaacaactgcgtctttgatgccaatgtgatcggtgataacactgctgaaggctatgttcttaaaccgtgtgaacccaaatggttaccgaatgggacgcgtgtggcgatcaaatgcaagaactccaaattcagcgagaagaagaaaagtgacaaaccgatcaagacacaagtcccactgacggaaattgataagaatctgctggacgtattggcctgttacgtcactttaaaccgcgtgaacaacgtgatctctaagattggaacagtgacgccgaaagattttggcaaagtaatgggtctgactgttcaggatattctggaagaaacgtcacgtgagggtattgttctgacgacatcggacaatcctgacctcgtcaagaaagaacttgttcgcatggtgcaggatgtattagaatcggcatggcgcgaactggtgtcg

SEQ ID NO: 324 - protein, 343 aa, synthetic construct
  REGION 1..343: note = variant of RNA ligase 2 from Escherichia phage RB69 (Bacteriophage RB69)
MHHHHHHGGSGMFKKYSSLENHYNSKFIEKLYANGLTDGVWVAREKIHGTNFSLIIERDNVTCAKRTGPIKPAEDFYGYEIVLKKYDKAIKTVQKFMYTAGAVSYQVFGEFAGPGIKKGVDYGEKDFYVFDILINTESGDNTYLTDYEMQDFCNEFGFKMAPMLGRGTFDSLIMIPNDFDSVLMAYNATAKEDLVKANNCVFDANVIGDNTAEGYVLKPCEPKWLPNGTRVAIKCKNSKFSEKKKSDKPIKTQVPLTEIDKNLLDVLACYVTLNRVNNVISKIGTVTPKDFGKVMGLTVQDILEETSREGIVLTTSDNPDLVKKELVRMVQDVLESAWRELVS

SEQ ID NO: 325 - DNA, 1029 bp, synthetic construct
  misc_feature 1..1029: note = variant of RNA ligase 2 from Escherichia phage RB69 (Bacteriophage RB69)
  source 1..1029: mol_type = other DNA
atgcatcaccatcaccatcacggtggcagcggtatgtttaagaaatattctagtctggaaaaccattacaatagcaaattcattgagaaactctatgctaacggcttaactgatggtgtatgggttgcgcgcgaaaagatccacgggacgaacttttcgctgattatcgagcgtgataatgtaacatgcgccaaacgtacaggcccgattaagcctgcagaagacttctacggttatgaaatcgtcctgaagaaatacgataaagcgattaagacggtgcagaaatttatgtataccgccggcgcggtttcctaccaagtgttcggagaatttgctggctctggtatcaagaaaggtgtcgattatggcgagaaagacttctatgtgtttgatattctgatcaatacggaatcaggagacaacacgtacctgactgattatgaaatgcaggacttctgtaatgaatttgggtttaagatggcaccaatgcttggtcgcggcacattcgatagcctgattatgattccgaacgatttcgattcggttctcatggcttacaatgcaacggcgaaagaggacctggtaaaagcgaacaactgcgtctttgatgccaatgtgatcggtgataacactgctgaaggctatgttcttaaaccgtgtgaacccaaatggttaccgaatgggacgcgtgtggcgatcaaatgcaagaactccaaattcagcgagaagaagaaaagtgacaaaccgatcaagacacaagtcccactgacggaaattgataagaatctgctggacgtattggcctgttacgtcactttaaaccgcgtgaacaacgtgatctctaagattggaacagtgacgccgaaagattttggcaaagtaatgggtctgactgttcaggatattctggaagaaacgtcacgtgagggtattgttctgacgacatcggacaatcctgacctcgtcaagaaagaacttgttcgcatggtgcaggatgtattagaatcggcatggcgcgaactggtgtcg

SEQ ID NO: 326 - protein, 343 aa, synthetic construct
  REGION 1..343: note = variant of RNA ligase 2 from Escherichia phage RB69 (Bacteriophage RB69)
MHHHHHHGGSGMFKKYSSLENHYNSKFIEKLYANGLTDGVWVAREKIHGTNFSLIIERDNVTCAKRTGPIKPAEDFYGYEIVLKKYDKAIKTVQKFMYTAGAVSYQVFGEFAGSGIKKGVDYGEKDFYVFDILINTESGDNTYLTDYEMQDFCNEFGFKMAPMLGRGTFDSLIMIPNDFDSVLMAYNATAKEDLVKANNCVFDANVIGDNTAEGYVLKPCEPKWLPNGTRVAIKCKNSKFSEKKKSDKPIKTQVPLTEIDKNLLDVLACYVTLNRVNNVISKIGTVTPKDFGKVMGLTVQDILEETSREGIVLTTSDNPDLVKKELVRMVQDVLESAWRELVS

SEQ ID NO: 327 - DNA, 1029 bp, synthetic construct
  misc_feature 1..1029: note = variant of RNA ligase 2 from Escherichia phage RB69 (Bacteriophage RB69)
  source 1..1029: mol_type = other DNA
atgcatcaccatcaccatcacggtggcagcggtatgtttaagaaatattctagtctggaaaaccattacaatagcaaattcattgagaaactctatgctaacggcttaactgatggtgtatgggttgcgcgcgaaaagatccacgggacgaacttttcgctgattatcgagcgtgataatgtaacatgcgccaaacgtacaggcccgattaagcctgcagaagacttctacggttatgaaatcgtcctgaagaaatacgataaagcgattaagacggtgcagaaatttatgtataccgccggcgcggtttcctaccaagtgttcggagaatttgctggcaacggtatctggaaaggtgtcgattatggcgagaaagacttctatgtgtttgatattctgatcaatacggaatcaggagacaacacgtacctgactgattatgaaatgcaggacttctgtaatgaatttgggtttaagatggcaccaatgcttggtcgcggcacattcgatagcctgattatgattccgaacgatttcgattcggttctcatggcttacaatgcaacggcgaaagaggacctggtaaaagcgaacaactgcgtctttgatgccaatgtgatcggtgataacactgctgaaggctatgttcttaaaccgtgtgaacccaaatggttaccgaatgggacgcgtgtggcgatcaaatgcaagaactccaaattcagcgagaagaagaaaagtgacaaaccgatcaagacacaagtcccactgacggaaattgataagaatctgctggacgtattggcctgttacgtcactttaaaccgcgtgaacaacgtgatctctaagattggaacagtgacgccgaaagattttggcaaagtaatgctgctgactgttcaggatattctggaagaaacgtcacgtgagggtattgttctgacgacatcggacaatcctgacctcgtcaagaaagaacttgttcgcatggtgcaggatgtattagaatcggcatggcgcgaactggtgtcg

SEQ ID NO: 328 - protein, 343 aa, synthetic construct
  REGION 1..343: note = variant of RNA ligase 2 from Escherichia phage RB69 (Bacteriophage RB69)
MHHHHHHGGSGMFKKYSSLENHYNSKFIEKLYANGLTDGVWVAREKIHGTNFSLIIERDNVTCAKRTGPIKPAEDFYGYEIVLKKYDKAIKTVQKFMYTAGAVSYQVFGEFAGNGIWKGVDYGEKDFYVFDILINTESGDNTYLTDYEMQDFCNEFGFKMAPMLGRGTFDSLIMIPNDFDSVLMAYNATAKEDLVKANNCVFDANVIGDNTAEGYVLKPCEPKWLPNGTRVAIKCKNSKFSEKKKSDKPIKTQVPLTEIDKNLLDVLACYVTLNRVNNVISKIGTVTPKDFGKVMLLTVQDILEETSREGIVLTTSDNPDLVKKELVRMVQDVLESAWRELVS

SEQ ID NO: 329 - DNA, 1029 bp, synthetic construct
  misc_feature 1..1029: note = variant of RNA ligase 2 from Escherichia phage RB69 (Bacteriophage RB69)
  source 1..1029: mol_type = other DNA
atgcatcaccatcaccatcacggtggcagcggtatgtttaagaaatattctagtctggaaaaccattacaatagcaaattcattgagaaactctatgctaacggcttaactgatggtgtatgggttgcgcgcgaaaagatccacgggacgaacttttcgctgattatcgagcgtgataatgtaacatgcgccaaacgtacaggcccgattaagcctgcagaagacttctacggttatgaaatcgtcctgaagaaatacgataaagcgattaagacggtgcagaaatttatgtataccgccggcgcggtttcctaccaagtgttcggagaatttgctggcaacggtatcaagaaatctgtcgattatggcgagaaagacttctatgtgtttgatattctgatcaatacggaatcaggagacaacacgtacctgactgattatgaaatgcaggacttctgtaatgaatttgggtttaagatggcaccaatgcttggtcgcggcacattcgatagcctgattatgattccgaacgatttcgattcggttctcatggcttacaatgcaacggcgaaagaggacctggtaaaagcgaacaactgcgtctttgatgccaatgtgatcggtgataacactgctgaaggctatgttcttaaaccgtgtgaacccaaatggttaccgaatgggacgcgtgtggcgatcaaatgcaagaactccaaattcagcgagaagaagaaaagtgacaaaccgatcaagacacaagtcccactgacggaaattgataagaatctgctggacgtattggcctgttacgtcactttaaaccgcgtgaacaacgtgatctctaagattggaacagtgacgccgaaagattttggcaaagtaatgggtctgactgttcaggatattctggaagaaacgtcacgtgagggtattgttctgacgacatcggacaatcctgacctcgtcaagaaagaacttgttcgcatggtgcaggatgtattagaatcggcatggcgcgaactggtgtcg

SEQ ID NO: 330 - protein, 343 aa, synthetic construct
  REGION 1..343: note = variant of RNA ligase 2 from Escherichia phage RB69 (Bacteriophage RB69)
MHHHHHHGGSGMFKKYSSLENHYNSKFIEKLYANGLTDGVWVAREKIHGTNFSLIIERDNVTCAKRTGPIKPAEDFYGYEIVLKKYDKAIKTVQKFMYTAGAVSYQVFGEFAGNGIKKSVDYGEKDFYVFDILINTESGDNTYLTDYEMQDFCNEFGFKMAPMLGRGTFDSLIMIPNDFDSVLMAYNATAKEDLVKANNCVFDANVIGDNTAEGYVLKPCEPKWLPNGTRVAIKCKNSKFSEKKKSDKPIKTQVPLTEIDKNLLDVLACYVTLNRVNNVISKIGTVTPKDFGKVMGLTVQDILEETSREGIVLTTSDNPDLVKKELVRMVQDVLESAWRELVS

SEQ ID NO: 331 - DNA, 1029 bp, synthetic construct
  misc_feature 1..1029: note = variant of RNA ligase 2 from Escherichia phage RB69 (Bacteriophage RB69)
  source 1..1029: mol_type = other DNA
atgcatcaccatcaccatcacggtggcagcggtatgtttaagaaatattctagtctggaaaaccattacaatagcccgttcattgagaaactctatgctaacggcttaactgatggtgtatgggttgcgcgcgaaaagatccacgggacgaacttttcgctgattatcgagcgtgataatgtaacatgcgccaaacgtacaggcccgattaagcctgcagaagacttctacggttatgaaatcgtcctgaagaaatacgataaagcgattaagacggtgcagaaatttatgtataccgccggcgcggtttcctaccaagtgttcggagaatttgctggcaacggtatctggaaaggtgtcgattatggcgagaaagacttctatgtgtttgatattctgatcaatacggaatcaggagacaacacgtacctgactgattatgaaatgcaggacttctgtaatgaatttgggtttaagatggcaccaatgcttggtcgcggcacattcgatagcctgattatgattccgaacgatttcgattcggttctcatggcttacaatgcaacggcgaaagaggacctggtaaaagcgaacaactgcgtctttgatgccaatgtgatcggtgataacactgctgaaggctatgttcttaaaccgtgtgaacccaaatggttaccgaatgggacgcgtgtggcgatcaaatgcaagaactccaaattcagcgagaagaagaaaagtgacaaaccgatcaagacacaagtcccactgacggaaattgataagaatctgctggacgtattggcctgttacgtcactttaaaccgcgtgaacaacgtgatctctaagattggaacagtgacgccgaaagattttggcaaagtaatgggtctgactgttcaggatattctggaagaaacgtcacgtgagggtattgttctgacgacatcggacaatcctgacctcgtcaagaaagaacttgttcgcatggtgcaggatgtattagaatcggcatggcgcgaactggtgtcg

SEQ ID NO: 332 - protein, 343 aa, synthetic construct
  REGION 1..343: note = variant of RNA ligase 2 from Escherichia phage RB69 (Bacteriophage RB69)
MHHHHHHGGSGMFKKYSSLENHYNSPFIEKLYANGLTDGVWVAREKIHGTNFSLIIERDNVTCAKRTGPIKPAEDFYGYEIVLKKYDKAIKTVQKFMYTAGAVSYQVFGEFAGNGIWKGVDYGEKDFYVFDILINTESGDNTYLTDYEMQDFCNEFGFKMAPMLGRGTFDSLIMIPNDFDSVLMAYNATAKEDLVKANNCVFDANVIGDNTAEGYVLKPCEPKWLPNGTRVAIKCKNSKFSEKKKSDKPIKTQVPLTEIDKNLLDVLACYVTLNRVNNVISKIGTVTPKDFGKVMGLTVQDILEETSREGIVLTTSDNPDLVKKELVRMVQDVLESAWRELVS

SEQ ID NO: 333 - DNA, 1029 bp, synthetic construct
  misc_feature 1..1029: note = variant of RNA ligase 2 from Escherichia phage RB69 (Bacteriophage RB69)
  source 1..1029: mol_type = other DNA
atgcatcaccatcaccatcacggtggcagcggtatgttttttaaatattctagtctggaaaaccattacaatagcaaattcattgagaaactctatgctaacggcttaactgatggtgtatgggttgcgcgcgaaaagatccacgggacgaacttttcgctgattatcgagcgtgataatgtaacatgcgccaaacgtacaggcccgattaagcctgcagaagacttctacggttatgaaatcgtcctgaagaaatacgataaagcgattaagacggtgcagaaatttatgtataccgccggcgcggtttcctaccaagtgttcggagaatttgctggcaacggtatctggaaaggtgtcgattatggcgagaaagacttctatgtgtttgatattctgatcaatacggaatcaggagacaacacgtacctgactgattatgaaatgcaggacttctgtaatgaatttgggtttaagatggcaccaatgcttggtcgcggcacattcgatagcctgattatgattccgaacgatttcgattcggttctcatggcttacaatgcaacggcgaaagaggacctggtaaaagcgaacaactgcgtctttgatgccaatgtgatcggtgataacactgctgaaggctatgttcttaaaccgtgtgaacccaaatggttaccgaatgggacgcgtgtggcgatcaaatgcaagaactccaaattcagcgagaagaagaaaagtgacaaaccgatcaagacacaagtcccactgacggaaattgataagaatctgctggacgtattggcctgttacgtcactttaaaccgcgtgaacaacgtgatctctaagattggaacagtgacgccgaaagattttggcaaagtaatgggtctgactgttcaggatattctggaagaaacgtcacgtgagggtattgttctgacgacatcggacaatcctgacctcgtcaagaaagaacttgttcgcatggtgcaggatgtattagaatcggcatggcgcgaactggtgtcg

SEQ ID NO: 334 - protein, 343 aa, synthetic construct
  REGION 1..343: note = variant of RNA ligase 2 from Escherichia phage RB69 (Bacteriophage RB69)
MHHHHHHGGSGMFFKYSSLENHYNSKFIEKLYANGLTDGVWVAREKIHGTNFSLIIERDNVTCAKRTGPIKPAEDFYGYEIVLKKYDKAIKTVQKFMYTAGAVSYQVFGEFAGNGIWKGVDYGEKDFYVFDILINTESGDNTYLTDYEMQDFCNEFGFKMAPMLGRGTFDSLIMIPNDFDSVLMAYNATAKEDLVKANNCVFDANVIGDNTAEGYVLKPCEPKWLPNGTRVAIKCKNSKFSEKKKSDKPIKTQVPLTEIDKNLLDVLACYVTLNRVNNVISKIGTVTPKDFGKVMGLTVQDILEETSREGIVLTTSDNPDLVKKELVRMVQDVLESAWRELVS

SEQ ID NO: 335 - DNA, 1029 bp, synthetic construct
  misc_feature 1..1029: note = variant of RNA ligase 2 from Escherichia phage RB69 (Bacteriophage RB69)
  source 1..1029: mol_type = other DNA
atgcatcaccatcaccatcacggtggcagcggtatgtttaagaaatattctagtctggaaaaccattacaatagcaaattcattgagaaactctatgctaacggcttaactgatggtgtatgggttgcgcgcgaaaagatccacgggacgaacttttcgctgattatcgagcgtgataatgtaacatgcgccaaacgtacaggcccgattaagcctgcagaagacttctacggttatgaaatcgtcctgaagaaatacgataaagcgattaagacggtgcagaaatttatgtataccgccggcgcggtttcctaccaagtgttcggagaatttgctggcgggggtatcaagaaaggtgtcgattatggcgagaaagacttctatgtgtttgatattctgatcaatacggaatcaggagacaacacgtacctgactgattatgaaatgcaggacttctgtaatgaatttgggtttaagatggcaccaatgcttggtcgcggcacattcgatagcctgattatgattccgaacgatttcgattcggttctcatggcttacaatgcaacggcgaaagaggacctggtaaaagcgaacaactgcgtctttgatgccaatgtgatcggtgataacactgctgaaggctatgttcttaaaccgtgtgaacccaaatggttaccgaatgggacgcgtgtggcgatcaaatgcaagaactccaaattcagcgagaagaagaaaagtgacaaaccgatcaagacacaagtcccactgacggaaattgataagaatctgctggacgtattggcctgttacgtcactttaaaccgcgtgaacaacgtgatctctaagattggaacagtgacgccgaaagattttggcaaagtaatgggtctgactgttcaggatattctggaagaaacgtcacgtgagggtattgttctgacgacatcggacaatcctgacctcgtcaagaaagaacttgttcgcatggtgcaggatgtattagaatcggcatggcgcgaactggtgtcg

SEQ ID NO: 336 - protein, 343 aa, synthetic construct
  REGION 1..343: note = variant of RNA ligase 2 from Escherichia phage RB69 (Bacteriophage RB69)
MHHHHHHGGSGMFKKYSSLENHYNSKFIEKLYANGLTDGVWVAREKIHGTNFSLIIERDNVTCAKRTGPIKPAEDFYGYEIVLKKYDKAIKTVQKFMYTAGAVSYQVFGEFAGGGIKKGVDYGEKDFYVFDILINTESGDNTYLTDYEMQDFCNEFGFKMAPMLGRGTFDSLIMIPNDFDSVLMAYNATAKEDLVKANNCVFDANVIGDNTAEGYVLKPCEPKWLPNGTRVAIKCKNSKFSEKKKSDKPIKTQVPLTEIDKNLLDVLACYVTLNRVNNVISKIGTVTPKDFGKVMGLTVQDILEETSREGIVLTTSDNPDLVKKELVRMVQDVLESAWRELVS

SEQ ID NO: 337 - DNA, 1029 bp, synthetic construct
  misc_feature 1..1029: note = variant of RNA ligase 2 from Escherichia phage RB69 (Bacteriophage RB69)
  source 1..1029: mol_type = other DNA
atgcatcaccatcaccatcacggtggcagcggtatgtttaagaaatattctagtctggaaaaccattacaatagcaaattcattgagaaactctatgctaacggcttaactgatggtgtatgggttgcgcgcgaaaagatccacgggacgaacttttcgctgattatcgagcgtgataatgtaacatgcgccaaacgtacaggcccgattaagcctgcagaagacttctacggttatgaaatcgtcctgaagaaatacgataaagcgattaagacggtgcagaaatttatgtataccgccggcgcggtttcctaccaagtgttcggagaatttgctggctttggtatcaagaaaggtgtcgattatggcgagaaagacttctatgtgtttgatattctgatcaatacggaatcaggagacaacacgtacctgactgattatgaaatgcaggacttctgtaatgaatttgggtttaagatggcaccaatgcttggtcgcggcacattcgatagcctgattatgattccgaacgatttcgattcggttctcatggcttacaatgcaacggcgaaagaggacctggtaaaagcgaacaactgcgtctttgatgccaatgtgatcggtgataacactgctgaaggctatgttcttaaaccgtgtgaacccaaatggttaccgaatgggacgcgtgtggcgatcaaatgcaagaactccaaattcagcgagaagaagaaaagtgacaaaccgatcaagacacaagtcccactgacggaaattgataagaatctgctggacgtattggcctgttacgtcactttaaaccgcgtgaacaacgtgatctctaagattggaacagtgacgccgaaagattttggcaaagtaatgggtctgactgttcaggatattctggaagaaacgtcacgtgagggtattgttctgacgacatcggacaatcctgacctcgtcaagaaagaacttgttcgcatggtgcaggatgtattagaatcggcatggcgcgaactggtgtcg

SEQ ID NO: 338 - protein, 343 aa, synthetic construct
  REGION 1..343: note = variant of RNA ligase 2 from Escherichia phage RB69 (Bacteriophage RB69)
MHHHHHHGGSGMFKKYSSLENHYNSKFIEKLYANGLTDGVWVAREKIHGTNFSLIIERDNVTCAKRTGPIKPAEDFYGYEIVLKKYDKAIKTVQKFMYTAGAVSYQVFGEFAGFGIKKGVDYGEKDFYVFDILINTESGDNTYLTDYEMQDFCNEFGFKMAPMLGRGTFDSLIMIPNDFDSVLMAYNATAKEDLVKANNCVFDANVIGDNTAEGYVLKPCEPKWLPNGTRVAIKCKNSKFSEKKKSDKPIKTQVPLTEIDKNLLDVLACYVTLNRVNNVISKIGTVTPKDFGKVMGLTVQDILEETSREGIVLTTSDNPDLVKKELVRMVQDVLESAWRELVS

SEQ ID NO: 339 - DNA, 1029 bp, synthetic construct
  misc_feature 1..1029: note = variant of RNA ligase 2 from Escherichia phage RB69 (Bacteriophage RB69)
  source 1..1029: mol_type = other DNA
atgcatcaccatcaccatcacggtggcagcggtatgtttaagaaatattctagtctggaaaaccattacaatagcaaattcattgagaaactctatgctaacggcttaactgatggtgtatgggttgcgcgcgaaaagatccacgggacgaacttttcgctgattatcgagcgtgataatgtaacatgcgccaaacgtacaggcccgattaagcctgcagaagacttctacggttatgaaatcgtcctgaagaaatacgataaagcgattaagacggtgcagaaatttatgtataccgccggcgcggtttcctaccaagtgttcggagaatttgctggcaacggtatcaagaaagctgtcgattatggcgagaaagacttctatgtgtttgatattctgatcaatacggaatcaggagacaacacgtacctgactgattatgaaatgcaggacttctgtaatgaatttgggtttaagatggcaccaatgcttggtcgcggcacattcgatagcctgattatgattccgaacgatttcgattcggttctcatggcttacaatgcaacggcgaaagaggacctggtaaaagcgaacaactgcgtctttgatgccaatgtgatcggtgataacactgctgaaggctatgttcttaaaccgtgtgaacccaaatggttaccgaatgggacgcgtgtggcgatcaaatgcaagaactccaaattcagcgagaagaagaaaagtgacaaaccgatcaagacacaagtcccactgacggaaattgataagaatctgctggacgtattggcctgttacgtcactttaaaccgcgtgaacaacgtgatctctaagattggaacagtgacgccgaaagattttggcaaagtaatgggtctgactgttcaggatattctggaagaaacgtcacgtgagggtattgttctgacgacatcggacaatcctgacctcgtcaagaaagaacttgttcgcatggtgcaggatgtattagaatcggcatggcgcgaactggtgtcg

SEQ ID NO: 340 - protein, 343 aa, synthetic construct
  REGION 1..343: note = variant of RNA ligase 2 from Escherichia phage RB69 (Bacteriophage RB69)
MHHHHHHGGSGMFKKYSSLENHYNSKFIEKLYANGLTDGVWVAREKIHGTNFSLIIERDNVTCAKRTGPIKPAEDFYGYEIVLKKYDKAIKTVQKFMYTAGAVSYQVFGEFAGNGIKKAVDYGEKDFYVFDILINTESGDNTYLTDYEMQDFCNEFGFKMAPMLGRGTFDSLIMIPNDFDSVLMAYNATAKEDLVKANNCVFDANVIGDNTAEGYVLKPCEPKWLPNGTRVAIKCKNSKFSEKKKSDKPIKTQVPLTEIDKNLLDVLACYVTLNRVNNVISKIGTVTPKDFGKVMGLTVQDILEETSREGIVLTTSDNPDLVKKELVRMVQDVLESAWRELVS

SEQ ID NO: 341 - DNA, 1029 bp, synthetic construct
  misc_feature 1..1029: note = variant of RNA ligase 2 from Escherichia phage RB69 (Bacteriophage RB69)
  source 1..1029: mol_type = other DNA
atgcatcaccatcaccatcacggtggcagcggtatgtttaagaaatattctagtctggaaaaccattacaatagcaaattcattgagaaactctatgctaacggcttaactgatggtgtatgggttgcgcgcgaaaagatccacgggacgaacttttcgctgattatcgagcgtgataatgtaacatgcgccaaacgtacaggcccgattaagcctgcagaagacttctacggttatgaaatcgtcctgaagaaatacgataaagcgattaagacggtgcagaaatttatgtataccgccggcgcggtttcctaccaagtgttcggagaatttgctggcaacggtatctggaaaggtgtcgattatggcgagaaagacttctatgtgtttgatattctgatcaatacggaatcaggagacaacacgtacctgactgattatgaaatgcaggacttctgtaatgaatttgggtttaagatggcaccaatgcttggtcgcggcacattcgatagcctgattatgattccgaacgatttcgattcggttgttatggcttacaatgcaacggcgaaagaggacctggtaaaagcgaacaactgcgtctttgatgccaatgtgatcggtgataacactgctgaaggctatgttcttaaaccgtgtgaacccaaatggttaccgaatgggacgcgtgtggcgatcaaatgcaagaactccaaattcagcgagaagaagaaaagtgacaaaccgatcaagacacaagtcccactgacggaaattgataagaatctgctggacgtattggcctgttacgtcactttaaaccgcgtgaacaacgtgatctctaagattggaacagtgacgccgaaagattttggcaaagtaatgggtctgactgttcaggatattctggaagaaacgtcacgtgagggtattgttctgacgacatcggacaatcctgacctcgtcaagaaagaacttgttcgcatggtgcaggatgtattagaatcggcatggcgcgaactggtgtcg

SEQ ID NO: 342 - protein, 343 aa, synthetic construct
  REGION 1..343: note = variant of RNA ligase 2 from Escherichia phage RB69 (Bacteriophage RB69)
MHHHHHHGGSGMFKKYSSLENHYNSKFIEKLYANGLTDGVWVAREKIHGTNFSLIIERDNVTCAKRTGPIKPAEDFYGYEIVLKKYDKAIKTVQKFMYTAGAVSYQVFGEFAGNGIWKGVDYGEKDFYVFDILINTESGDNTYLTDYEMQDFCNEFGFKMAPMLGRGTFDSLIMIPNDFDSVVMAYNATAKEDLVKANNCVFDANVIGDNTAEGYVLKPCEPKWLPNGTRVAIKCKNSKFSEKKKSDKPIKTQVPLTEIDKNLLDVLACYVTLNRVNNVISKIGTVTPKDFGKVMGLTVQDILEETSREGIVLTTSDNPDLVKKELVRMVQDVLESAWRELVS

SEQ ID NO: 343 - DNA, 1029 bp, synthetic construct
  misc_feature 1..1029: note = variant of RNA ligase 2 from Escherichia phage RB69 (Bacteriophage RB69)
  source 1..1029: mol_type = other DNA
atgcatcaccatcaccatcacggtggcagcggtatgtttaagaaatattctagtctggaaaaccattacaatagccggttcattgagaaactctatgctaacggcttaactgatggtgtatgggttgcgcgcgaaaagatccacgggacgaacttttcgctgattatcgagcgtgataatgtaacatgcgccaaacgtacaggcccgattaagcctgcagaagacttctacggttatgaaatcgtcctgaagaaatacgataaagcgattaagacggtgcagaaatttatgtataccgccggcgcggtttcctaccaagtgttcggagaatttgctggcaacggtatctggaaaggtgtcgattatggcgagaaagacttctatgtgtttgatattctgatcaatacggaatcaggagacaacacgtacctgactgattatgaaatgcaggacttctgtaatgaatttgggtttaagatggcaccaatgcttggtcgcggcacattcgatagcctgattatgattccgaacgatttcgattcggttctcatggcttacaatgcaacggcgaaagaggacctggtaaaagcgaacaactgcgtctttgatgccaatgtgatcggtgataacactgctgaaggctatgttcttaaaccgtgtgaacccaaatggttaccgaatgggacgcgtgtggcgatcaaatgcaagaactccaaattcagcgagaagaagaaaagtgacaaaccgatcaagacacaagtcccactgacggaaattgataagaatctgctggacgtattggcctgttacgtcactttaaaccgcgtgaacaacgtgatctctaagattggaacagtgacgccgaaagattttggcaaagtaatgggtctgactgttcaggatattctggaagaaacgtcacgtgagggtattgttctgacgacatcggacaatcctgacctcgtcaagaaagaacttgttcgcatggtgcaggatgtattagaatcggcatggcgcgaactggtgtcg

SEQ ID NO: 344 - protein, 343 aa, synthetic construct
  REGION 1..343: note = variant of RNA ligase 2 from Escherichia phage RB69 (Bacteriophage RB69)
MHHHHHHGGSGMFKKYSSLENHYNSRFIEKLYANGLTDGVWVAREKIHGTNFSLIIERDNVTCAKRTGPIKPAEDFYGYEIVLKKYDKAIKTVQKFMYTAGAVSYQVFGEFAGNGIWKGVDYGEKDFYVFDILINTESGDNTYLTDYEMQDFCNEFGFKMAPMLGRGTFDSLIMIPNDFDSVLMAYNATAKEDLVKANNCVFDANVIGDNTAEGYVLKPCEPKWLPNGTRVAIKCKNSKFSEKKKSDKPIKTQVPLTEIDKNLLDVLACYVTLNRVNNVISKIGTVTPKDFGKVMGLTVQDILEETSREGIVLTTSDNPDLVKKELVRMVQDVLESAWRELVS

SEQ ID NO: 345 - DNA, 1029 bp, synthetic construct
  misc_feature 1..1029: note = variant of RNA ligase 2 from Escherichia phage RB69 (Bacteriophage RB69)
  source 1..1029: mol_type = other DNA
atgcatcaccatcaccatcacggtggcagcggtatgtttaagaaatattctagtctggaaaaccattacaatagcaaattcattgagaaactctatgctaacggcttaactgatggtgtatgggttgcgcgcgaaaagatccacgggacgaacttttcgctgattatcgagcgtgataatgtaacatgcgccaaacgtacaggcccgattaagcctgcagaagacttctacggttatgaaatcgtcctgaagaaatacgataaagcgattaagacggtgcagaaatttatgtataccgccggcgcggtttcctaccaagtgttcggagaatttgctggtaacggtatcaagaaaggtgtcgattatggcgagaaagacttctatgtgtttgatattctgatcaatacggaatcaggagacaacacgtacctgactgattatgaaatgcaggacttctgtaatgaatttgggtttaagatggcaccaatgcttggtcgcggcacattcgatagcctgattatgattccgaacgatttcgattcggttctcatggcttacaatgcaacggcgaaagaggacctggtaaaagcgaacaactgcgtctttgatgccaatgtgatcggtgataacactgctgaaggctatgttcttaaaccgtgtgaacccaaatggttaccgaatgggacgcgtgtggcgatcaaatgcaagaactccaaattcagcgagaagaagaaaagtgacaaaccgatcaagacacaagtcccactgacggaaattgataagaatctgctggacgtattggcctgttacgtcactttaaaccgcgtgaacaacgtgatctctaagattggaacagtgacgccgaaagattttggcaaagtaatgggtctgactgttcaggatattctggaagaaacgtcacgtgagggtattgttctgacgacatcggacaatcctgacctcgtcaagaaagaacttgttcgcatggtgcaggatgtattagaatcggcatggcgcgaactggtgtcg

SEQ ID NO: 346 - protein, 343 aa, synthetic construct; identical to SEQ ID NO: 300
  REGION 1..343: note = variant of RNA ligase 2 from Escherichia phage RB69 (Bacteriophage RB69)

SEQ ID NO: 347 - DNA, 1029 bp, synthetic construct
  misc_feature 1..1029: note = variant of RNA ligase 2 from Escherichia phage RB69 (Bacteriophage RB69)
  source 1..1029: mol_type = other DNA
atgcatcaccatcaccatcacggtggcagcggtatgtttaagaaatattctagtctggaaaaccattacaatagcaaattcattgagaaactctatgctaacggcttaactgatggtgtatgggttgcgcgcgaaaagatccacgggacgaacttttcgctgattatcgagcgtgataatgtaacatgcgccaaacgtacaggcccgattaagcctgcagaagacttctacggttatgaaatcgtcctgaagaaatacgataaagcgattaagacggtgcagaaatttatgtataccgccggcgcggtttcctaccaagtgttcggagaatttgctggcaacggtatctggaaaggtgtcgattatggcgagaaagacttctatgtgtttgatattctgatcaatacggaatcaggagacaacacgtacctgactgattatgaaatgcaggacttctgtaatgaatttgggtttaagatggcaccaatgcttggtcgcggcacattcgatagcctgattatgattccgaacgatttcgattcggttctcatggcttacaatgcaacggcgaaagaggacctggtaaaagcgaacaactgcgtctttgatgccaatgtgatcggtgataacactgctgaaggctatgttcttaaaccgtgtgaacccaaatggttaccgaatgggacgcgtgtggcgatcaaatgcaagaactccaaattcagcgagaagaagaaaagtgacaaaccgatcaagacacaagtcccactgacggaaattgataagaatctgctggacgtattggcctgttacgtcactttaaaccgcgtgaacaacgtgatctctaagattggaacagtgacgccgaaagattttggcaaagtaatgcggctgactgttcaggatattctggaagaaacgtcacgtgagggtattgttctgacgacatcggacaatcctgacctcgtcaagaaagaacttgttcgcatggtgcaggatgtattagaatcggcatggcgcgaactggtgtcg

SEQ ID NO: 348 - protein, 343 aa, synthetic construct
  REGION 1..343: note = variant of RNA ligase 2 from Escherichia phage RB69 (Bacteriophage RB69)
MHHHHHHGGSGMFKKYSSLENHYNSKFIEKLYANGLTDGVWVAREKIHGTNFSLIIERDNVTCAKRTGPIKPAEDFYGYEIVLKKYDKAIKTVQKFMYTAGAVSYQVFGEFAGNGIWKGVDYGEKDFYVFDILINTESGDNTYLTDYEMQDFCNEFGFKMAPMLGRGTFDSLIMIPNDFDSVLMAYNATAKEDLVKANNCVFDANVIGDNTAEGYVLKPCEPKWLPNGTRVAIKCKNSKFSEKKKSDKPIKTQVPLTEIDKNLLDVLACYVTLNRVNNVISKIGTVTPKDFGKVMRLTVQDILEETSREGIVLTTSDNPDLVKKELVRMVQDVLESAWRELVS

SEQ ID NO: 349 - DNA, 1029 bp, synthetic construct
  misc_feature 1..1029: note = variant of RNA ligase 2 from Escherichia phage RB69 (Bacteriophage RB69)
  source 1..1029: mol_type = other DNA
atgcatcaccatcaccatcacggtggcagcggtatgtttaagaaatattctagtctggaaaaccattacaatagcaaattcattgagaaactctatgctaacggcttaactgatggtgtatgggttgcgcgcgaaaagatccacgggacgaacttttcgctgattatcgagcgtgataatgtaacatgcgccaaacgtacaggcccgattaagcctgcagaagacttctacggttatgaaatcgtcctgaagaaatacgataaagcgattaagacggtgcagaaatttatgtataccgccggcgcggtttcctaccaagtgttcggagaatttgctggcaacggtatctggaaaggtgtcgattatggcgagaaagacttctatgtgtttgatattctgatcaatacggaatcaggagacaacacgtacctgactgattatgaaatgcaggacttctgtaatgaatttgggtttaagatggcaccaatgcttggtcgcggcacattcgatagcctgattatgattccgaacgatttcgattcggttctcatgtcgtacaatgcaacggcgaaagaggacctggtaaaagcgaacaactgcgtctttgatgccaatgtgatcggtgataacactgctgaaggctatgttcttaaaccgtgtgaacccaaatggttaccgaatgggacgcgtgtggcgatcaaatgcaagaactccaaattcagcgagaagaagaaaagtgacaaaccgatcaagacacaagtcccactgacggaaattgataagaatctgctggacgtattggcctgttacgtcactttaaaccgcgtgaacaacgtgatctctaagattggaacagtgacgccgaaagattttggcaaagtaatgggtctgactgttcaggatattctggaagaaacgtcacgtgagggtattgttctgacgacatcggacaatcctgacctcgtcaagaaagaacttgttcgcatggtgcaggatgtattagaatcggcatggcgcgaactggtgtcg

SEQ ID NO: 350 - protein, 343 aa, synthetic construct
  REGION 1..343: note = variant of RNA ligase 2 from Escherichia phage RB69 (Bacteriophage RB69)
MHHHHHHGGSGMFKKYSSLENHYNSKFIEKLYANGLTDGVWVAREKIHGTNFSLIIERDNVTCAKRTGPIKPAEDFYGYEIVLKKYDKAIKTVQKFMYTAGAVSYQVFGEFAGNGIWKGVDYGEKDFYVFDILINTESGDNTYLTDYEMQDFCNEFGFKMAPMLGRGTFDSLIMIPNDFDSVLMSYNATAKEDLVKANNCVFDANVIGDNTAEGYVLKPCEPKWLPNGTRVAIKCKNSKFSEKKKSDKPIKTQVPLTEIDKNLLDVLACYVTLNRVNNVISKIGTVTPKDFGKVMGLTVQDILEETSREGIVLTTSDNPDLVKKELVRMVQDVLESAWRELVS

SEQ ID NO: 351 - DNA, 1029 bp, synthetic construct
  misc_feature 1..1029: note = variant of RNA ligase 2 from Escherichia phage RB69 (Bacteriophage RB69)
  source 1..1029: mol_type = other DNA
atgcatcaccatcaccatcacggtggcagcggtatgtttaagaaatattctagtctggaaaaccattacaatagctttttcattgagaaactctatgctaacggcttaactgatggtgtatgggttgcgcgcgaaaagatccacgggacgaacttttcgctgattatcgagcgtgataatgtaacatgcgccaaacgtacaggcccgattaagcctgcagaagacttctacggttatgaaatcgtcctgaagaaatacgataaagcgattaagacggtgcagaaatttatgtataccgccggcgcggtttcctaccaagtgttcggagaatttgctggcaacggtatctggaaaggtgtcgattatggcgagaaagacttctatgtgtttgatattctgatcaatacggaatcaggagacaacacgtacctgactgattatgaaatgcaggacttctgtaatgaatttgggtttaagatggcaccaatgcttggtcgcggcacattcgatagcctgattatgattccgaacgatttcgattcggttctcatggcttacaatgcaacggcgaaagaggacctggtaaaagcgaacaactgcgtctttgatgccaatgtgatcggtgataacactgctgaaggctatgttcttaaaccgtgtgaacccaaatggttaccgaatgggacgcgtgtggcgatcaaatgcaagaactccaaattcagcgagaagaagaaaagtgacaaaccgatcaagacacaagtcccactgacggaaattgataagaatctgctggacgtattggcctgttacgtcactttaaaccgcgtgaacaacgtgatctctaagattggaacagtgacgccgaaagattttggcaaagtaatgggtctgactgttcaggatattctggaagaaacgtcacgtgagggtattgttctgacgacatcggacaatcctgacctcgtcaagaaagaacttgttcgcatggtgcaggatgtattagaatcggcatggcgcgaactggtgtcg

SEQ ID NO: 352 - protein, 343 aa, synthetic construct
  REGION 1..343: note = variant of RNA ligase 2 from Escherichia phage RB69 (Bacteriophage RB69)
MHHHHHHGGSGMFKKYSSLENHYNSFFIEKLYANGLTDGVWVAREKIHGTNFSLIIERDNVTCAKRTGPIKPAEDFYGYEIVLKKYDKAIKTVQKFMYTAGAVSYQVFGEFAGNGIWKGVDYGEKDFYVFDILINTESGDNTYLTDYEMQDFCNEFGFKMAPMLGRGTFDSLIMIPNDFDSVLMAYNATAKEDLVKANNCVFDANVIGDNTAEGYVLKPCEPKWLPNGTRVAIKCKNSKFSEKKKSDKPIKTQVPLTEIDKNLLDVLACYVTLNRVNNVISKIGTVTPKDFGKVMGLTVQDILEETSREGIVLTTSDNPDLVKKELVRMVQDVLESAWRELVS

SEQ ID NO: 353 - DNA, 1029 bp, synthetic construct
  misc_feature 1..1029: note = variant of RNA ligase 2 from Escherichia phage RB69 (Bacteriophage RB69)
  source 1..1029: mol_type = other DNA
atgcatcaccatcaccatcacggtggcagcggtatgtttaagaaatattctagtctggaaaaccattacaatagcaaattcattgagaaactctatgctaacggcttaactgatggtgtatgggttgcgcgcgaaaagatccacgggacgaacttttcgctgattatcgagcgtgataatgtaacatgcgccaaacgtacaggcccgattaagcctgcagaagacttctacggttatgaaatcgtcctgaagaaatacgataaagcgattaagacggtgcagaaatttatgtataccgccggcgcggtttcctaccaagtgttcggagaatttgctggcaacggtatcaagttgggtgtcgattatggcgagaaagacttctatgtgtttgatattctgatcaatacggaatcaggagacaacacgtacctgactgattatgaaatgcaggacttctgtaatgaatttgggtttaagatggcaccaatgcttggtcgcggcacattcgatagcctgattatgattccgaacgatttcgattcggttctcatggcttacaatgcaacggcgaaagaggacctggtaaaagcgaacaactgcgtctttgatgccaatgtgatcggtgataacactgctgaaggctatgttcttaaaccgtgtgaacccaaatggttaccgaatgggacgcgtgtggcgatcaaatgcaagaactccaaattcagcgagaagaagaaaagtgacaaaccgatcaagacacaagtcccactgacggaaattgataagaatctgctggacgtattggcctgttacgtcactttaaaccgcgtgaacaacgtgatctctaagattggaacagtgacgccgaaagattttggcaaagtaatgggtctgactgttcaggatattctggaagaaacgtcacgtgagggtattgttctgacgacatcggacaatcctgacctcgtcaagaaagaacttgttcgcatggtgcaggatgtattagaatcggcatggcgcgaactggtgtcg

SEQ ID NO: 354 - protein, 343 aa, synthetic construct
  REGION 1..343: note = variant of RNA ligase 2 from Escherichia phage RB69 (Bacteriophage RB69)
MHHHHHHGGSGMFKKYSSLENHYNSKFIEKLYANGLTDGVWVAREKIHGTNFSLIIERDNVTCAKRTGPIKPAEDFYGYEIVLKKYDKAIKTVQKFMYTAGAVSYQVFGEFAGNGIKLGVDYGEKDFYVFDILINTESGDNTYLTDYEMQDFCNEFGFKMAPMLGRGTFDSLIMIPNDFDSVLMAYNATAKEDLVKANNCVFDANVIGDNTAEGYVLKPCEPKWLPNGTRVAIKCKNSKFSEKKKSDKPIKTQVPLTEIDKNLLDVLACYVTLNRVNNVISKIGTVTPKDFGKVMGLTVQDILEETSREGIVLTTSDNPDLVKKELVRMVQDVLESAWRELVS

SEQ ID NO: 355 - DNA, 1029 bp, synthetic construct
  misc_feature 1..1029: note = variant of RNA ligase 2 from Escherichia phage RB69 (Bacteriophage RB69)
  source 1..1029: mol_type = other DNA
atgcatcaccatcaccatcacggtggcagcggtatgtttaagaaatattctagtctggaaaaccattacaatagcaaattcattgagaaactctatgctaacggcttaactgatggtgtatgggttgcgcgcgaaaagatccacgggacgaacttttcgctgattatcgagcgtgataatgtaacatgcgccaaacgtacaggcccgattaagcctgcagaagacttctacggttatgaaatcgtcctgaagaaatacgataaagcgattaagacggtgcagaaatttatgtataccgccggcgcggtttcctaccaagtgttcggagaatttgctggcaacggtatctggaaaggtgtcgattatggcgagaaagacttctatgtgtttgatattctgatcaatacggaatcaggagacaacacgtacctgactgattatgaaatgcaggacttctgtaatgaatttgggtttaagatggcaccaatgcttggtcgcggcacattcgatagcctgattatgattccgaacgatttcgattcggttctcatggcttacaatgcaacggcgaaagaggacctggtaaaagcgaacaactgcgtctttgatgccaatgtgatcggtgataacactgctgaaggctatgttcttaaaccgtgtgaacccaaatggttaccgaatgggacgcgtgtggcgatcaaatgcaagaactccaaattcagcgagaagaagaaaagtgacaaaccgatcaagacacaagtcccactgacggaaattgataagaatctgctggacgtattggcctgttacgtcactttaaaccgcgtgaacaacgtgatctctaagattggaacagtgacgccgaaagattttggcaaagtaatgggtctgactgttcaggatattctggaagaaacggcgcgtgagggtattgttctgacgacatcggacaatcctgacctcgtcaagaaagaacttgttcgcatggtgcaggatgtattagaatcggcatggcgcgaactggtgtcg

SEQ ID NO: 356 - protein, 343 aa, synthetic construct
  REGION 1..343: note = variant of RNA ligase 2 from Escherichia phage RB69 (Bacteriophage RB69)
MHHHHHHGGSGMFKKYSSLENHYNSKFIEKLYANGLTDGVWVAREKIHGTNFSLIIERDNVTCAKRTGPIKPAEDFYGYEIVLKKYDKAIKTVQKFMYTAGAVSYQVFGEFAGNGIWKGVDYGEKDFYVFDILINTESGDNTYLTDYEMQDFCNEFGFKMAPMLGRGTFDSLIMIPNDFDSVLMAYNATAKEDLVKANNCVFDANVIGDNTAEGYVLKPCEPKWLPNGTRVAIKCKNSKFSEKKKSDKPIKTQVPLTEIDKNLLDVLACYVTLNRVNNVISKIGTVTPKDFGKVMGLTVQDILEETAREGIVLTTSDNPDLVKKELVRMVQDVLESAWRELVS

SEQ ID NO: 357 - DNA, 1029 bp, synthetic construct
  misc_feature 1..1029: note = variant of RNA ligase 2 from Escherichia phage RB69 (Bacteriophage RB69)
  source 1..1029: mol_type = other DNA
atgcatcaccatcaccatcacggtggcagcggtatgtttaagaaatattctagtctggaaaaccattacaatagcaaattcattgagaggctctatgctaacggcttaactgatggtgtatgggttgcgcgcgaaaagatccacgggacgaacttttcgctgattatcgagcgtgataatgtaacatgcgccaaacgtacaggcccgattaagcctgcagaagacttctacggttatgaaatcgtcctgaagaaatacgataaagcgattaagacggtgcagaaatttatgtataccgccggcgcggtttcctaccaagtgttcggagaatttgctggcaacggtatctggaaaggtgtcgattatggcgagaaagacttctatgtgtttgatattctgatcaatacggaatcaggagacaacacgtacctgactgattatgaaatgcaggacttctgtaatgaatttgggtttaagatggcaccaatgcttggtcgcggcacattcgatagcctgattatgattccgaacgatttcgattcggttctcatggcttacaatgcaacggcgaaagaggacctggtaaaagcgaacaactgcgtctttgatgccaatgtgatcggtgataacactgctgaaggctatgttcttaaaccgtgtgaacccaaatggttaccgaatgggacgcgtgtggcgatcaaatgcaagaactccaaattcagcgagaagaagaaaagtgacaaaccgatcaagacacaagtcccactgacggaaattgataagaatctgctggacgtattggcctgttacgtcactttaaaccgcgtgaacaacgtgatctctaagattggaacagtgacgccgaaagattttggcaaagtaatgggtctgactgttcaggatattctggaagaaacgtcacgtgagggtattgttctgacgacatcggacaatcctgacctcgtcaagaaagaacttgttcgcatggtgcaggatgtattagaatcggcatggcgcgaactggtgtcg

SEQ ID NO: 358 - protein, 343 aa, synthetic construct
  REGION 1..343: note = variant of RNA ligase 2 from Escherichia phage RB69 (Bacteriophage RB69)
MHHHHHHGGSGMFKKYSSLENHYNSKFIERLYANGLTDGVWVAREKIHGTNFSLIIERDNVTCAKRTGPIKPAEDFYGYEIVLKKYDKAIKTVQKFMYTAGAVSYQVFGEFAGNGIWKGVDYGEKDFYVFDILINTESGDNTYLTDYEMQDFCNEFGFKMAPMLGRGTFDSLIMIPNDFDSVLMAYNATAKEDLVKANNCVFDANVIGDNTAEGYVLKPCEPKWLPNGTRVAIKCKNSKFSEKKKSDKPIKTQVPLTEIDKNLLDVLACYVTLNRVNNVISKIGTVTPKDFGKVMGLTVQDILEETSREGIVLTTSDNPDLVKKELVRMVQDVLESAWRELVS

SEQ ID NO: 359 - DNA, 1029 bp, synthetic construct
  misc_feature 1..1029: note = variant of RNA ligase 2 from Escherichia phage RB69 (Bacteriophage RB69)
  source 1..1029: mol_type = other DNA
atgcatcaccatcaccatcacggtggcagcggttcttttaagaaatattctagtctggaaaaccattacaatagcaaattcattgagaaactctatgctaacggcttaactgatggtgtatgggttgcgcgcgaaaagatccacgggacgaacttttcgctgattatcgagcgtgataatgtaacatgcgccaaacgtacaggcccgattaagcctgcagaagacttctacggttatgaaatcgtcctgaagaaatacgataaagcgattaagacggtgcagaaatttatgtataccgccggcgcggtttcctaccaagtgttcggagaatttgctggcaacggtatctggaaaggtgtcgattatggcgagaaagacttctatgtgtttgatattctgatcaatacggaatcaggagacaacacgtacctgactgattatgaaatgcaggacttctgtaatgaatttgggtttaagatggcaccaatgcttggtcgcggcacattcgatagcctgattatgattccgaacgatttcgattcggttctcatggcttacaatgcaacggcgaaagaggacctggtaaaagcgaacaactgcgtctttgatgccaatgtgatcggtgataacactgctgaaggctatgttcttaaaccgtgtgaacccaaatggttaccgaatgggacgcgtgtggcgatcaaatgcaagaactccaaattcagcgagaagaagaaaagtgacaaaccgatcaagacacaagtcccactgacggaaattgataagaatctgctggacgtattggcctgttacgtcactttaaaccgcgtgaacaacgtgatctctaagattggaacagtgacgccgaaagattttggcaaagtaatgggtctgactgttcaggatattctggaagaaacgtcacgtgagggtattgttctgacgacatcggacaatcctgacctcgtcaagaaagaacttgttcgcatggtgcaggatgtattagaatcggcatggcgcgaactggtgtcg

SEQ ID NO: 360 - protein, 343 aa, synthetic construct
  REGION 1..343: note = variant of RNA ligase 2 from Escherichia phage RB69 (Bacteriophage RB69)
MHHHHHHGGSGSFKKYSSLENHYNSKFIEKLYANGLTDGVWVAREKIHGTNFSLIIERDNVTCAKRTGPIKPAEDFYGYEIVLKKYDKAIKTVQKFMYTAGAVSYQVFGEFAGNGIWKGVDYGEKDFYVFDILINTESGDNTYLTDYEMQDFCNEFGFKMAPMLGRGTFDSLIMIPNDFDSVLMAYNATAKEDLVKANNCVFDANVIGDNTAEGYVLKPCEPKWLPNGTRVAIKCKNSKFSEKKKSDKPIKTQVPLTEIDKNLLDVLACYVTLNRVNNVISKIGTVTPKDFGKVMGLTVQDILEETSREGIVLTTSDNPDLVKKELVRMVQDVLESAWRELVS

SEQ ID NO: 361 - DNA, 1029 bp, synthetic construct
  misc_feature 1..1029: note = variant of RNA ligase 2 from Escherichia phage RB69 (Bacteriophage RB69)
  source 1..1029: mol_type = other DNA
atgcatcaccatcaccatcacggtggcagcggtatgtttaagaaatattctagtctggaaaaccattacaatagcaaattcattgagaaactctatgctaacggcttaactgatggtgtatgggttgcgcgcgaaaagatccacgggacgaacttttcgctgattatcgagcgtgataatgtaacatgcgccaaacgtacaggcccgattaagcctgcagaagacttctacggttatgaaatcgtcctgaagaaatacgataaagcgattaagacggcgcagaaatttatgtataccgccggcgcggtttcctaccaagtgttcggagaatttgctggcaacggtatctggaaaggtgtcgattatggcgagaaagacttctatgtgtttgatattctgatcacgacggaatcaggagacaacacgtacctgactgattatgaaatgcaggacttctgtaatgaatttgggtttaagatggcaccaatgcttggtcgcggcacattcgatagcctgattatgattccgaacgatttcgattcggttctcatggcttacaatgcaacggcgaaagaggacctggtaaaagcgaacaactgcgtctttgatgccaatgtgatcggtgataacactgctgaaggctatgttcttaaaccgtgtgaacccaaatggttaccgaatgggacgcgtgtggcgatcaaatgcaagaactccaaattcagcgagaagaagaaaagtgacaaaccgatcaagacacaagtcccactgacggaaattgataagaatctgctggacgtattggcctgttacgtcactttaaaccgcgtgaacaacgtgatctctaagattggaacagtgacgccgaaagattttggcaaagtaatgggtctgactgttcaggatattctggaagaaacgtcacgtgagggtattgttctgacgacatcggacaatcctgacctcgtcaagaaagaacttgttcgcatggtgcaggatgtattagaatcggcatggcgcgaactggtgtcg

SEQ ID NO: 362 - protein, 343 aa, synthetic construct
  REGION 1..343: note = variant of RNA ligase 2 from Escherichia phage RB69 (Bacteriophage RB69)
MHHHHHHGGSGMFKKYSSLENHYNSKFIEKLYANGLTDGVWVAREKIHGTNFSLIIERDNVTCAKRTGPIKPAEDFYGYEIVLKKYDKAIKTAQKFMYTAGAVSYQVFGEFAGNGIWKGVDYGEKDFYVFDILITTESGDNTYLTDYEMQDFCNEFGFKMAPMLGRGTFDSLIMIPNDFDSVLMAYNATAKEDLVKANNCVFDANVIGDNTAEGYVLKPCEPKWLPNGTRVAIKCKNSKFSEKKKSDKPIKTQVPLTEIDKNLLDVLACYVTLNRVNNVISKIGTVTPKDFGKVMGLTVQDILEETSREGIVLTTSDNPDLVKKELVRMVQDVLESAWRELVS

SEQ ID NO: 363 - DNA, 1029 bp, synthetic construct
  misc_feature 1..1029: note = variant of RNA ligase 2 from Escherichia phage RB69 (Bacteriophage RB69)
  source 1..1029: mol_type = other DNA
atgcatcaccatcaccatcacggtggcagcggtatgtttaagaaatattctagtctggaaaaccattacaatagcaaattcattgagaaactctatgctaacggcttaactgatggtgtatgggttgcgcgcgaaaagatccacgggacgaacttttcgctgattatcgagcgtgataatgtaacatgcgccaaacgtacaggcccgattaagcctgcagaagacttctacggttatgaaatcgtcctgaagaaatacgataaagcgattaagacggtgcagaaatttatgtataccgccggcgcggtttcctaccaagtgttcggagaatttgctggcaacggtatcaagcagggtgtcgattatggcgagaaagacttctatgtgtttgatattctgatcaatacggaatcaggagacaacacgtacctgactgattatgaaatgcaggacttctgtaatgaatttgggtttaagatggcaccaatgcttggtcgcggcacattcgatagcctgattatgattccgaacgatttcgattcggttctcatggcttacaatgcaacggcgaaagaggacctggtaaaagcgaacaactgcgtctttgatgccaatgtgatcggtgataacactgctgaaggctatgttcttaaaccgtgtgaacccaaatggttaccgaatgggacgcgtgtggcgatcaaatgcaagaactccaaattcagcgagaagaagaaaagtgacaaaccgatcaagacacaagtcccactgacggaaattgataagaatctgctggacgtattggcctgttacgtcactttaaaccgcgtgaacaacgtgatctctaagattggaacagtgacgccgaaagattttggcaaagtaatgggtctgactgttcaggatattctggaagaaacgtcacgtgagggtattgttctgacgacatcggacaatcctgacctcgtcaagaaagaacttgttcgcatggtgcaggatgtattagaatcggcatggcgcgaactggtgtcg

SEQ ID NO: 364 - protein, 343 aa, synthetic construct
  REGION 1..343: note = variant of RNA ligase 2 from Escherichia phage RB69 (Bacteriophage RB69)
MHHHHHHGGSGMFKKYSSLENHYNSKFIEKLYANGLTDGVWVAREKIHGTNFSLIIERDNVTCAKRTGPIKPAEDFYGYEIVLKKYDKAIKTVQKFMYTAGAVSYQVFGEFAGNGIKQGVDYGEKDFYVFDILINTESGDNTYLTDYEMQDFCNEFGFKMAPMLGRGTFDSLIMIPNDFDSVLMAYNATAKEDLVKANNCVFDANVIGDNTAEGYVLKPCEPKWLPNGTRVAIKCKNSKFSEKKKSDKPIKTQVPLTEIDKNLLDVLACYVTLNRVNNVISKIGTVTPKDFGKVMGLTVQDILEETSREGIVLTTSDNPDLVKKELVRMVQDVLESAWRELVS

SEQ ID NO: 365 - DNA, 1029 bp, synthetic construct
  misc_feature 1..1029: note = variant of RNA ligase 2 from Escherichia phage RB69 (Bacteriophage RB69)
  source 1..1029: mol_type = other DNA
atgcatcaccatcaccatcacggtggcagcggtatgtttaagaaatattctagtctggaaaaccattacaatagcaaattcattgagaaactctatgctaacggcttaactgatggtgtatgggttgcgcgcgaaaagatccacgggacgaacttttcgctgattatcgagcgtgataatgtaacatgcgccaaacgtacaggcccgattaagcctgcagaagacttctacggttatgaaatcgtcctgaagaaatacgataaagcgattaagacggtgcagaaatttatgtataccgccggcgcggtttcctaccaagtgttcggagaatttgctggcaacggtatctggaaaggtgtcgattatggcgagaaagacttctatgtgtttgatattctgatcaatacggaatcaggagacaacacgtacctgactgattatgaaatgcaggacttctgtaatgaatttgggtttaagatggcaccaatgcttggtcgcggcacattcgatagcctgattatgattccgaacgatttcgattcggttctcatgcattacaatgcaacggcgaaagaggacctggtaaaagcgaacaactgcgtctttgatgccaatgtgatcggtgataacactgctgaaggctatgttcttaaaccgtgtgaacccaaatggttaccgaatgggacgcgtgtggcgatcaaatgcaagaactccaaattcagcgagaagaagaaaagtgacaaaccgatcaagacacaagtcccactgacggaaattgataagaatctgctggacgtattggcctgttacgtcactttaaaccgcgtgaacaacgtgatctctaagattggaacagtgacgccgaaagattttggcaaagtaatgggtctgactgttcaggatattctggaagaaacgtcacgtgagggtattgttctgacgacatcggacaatcctgacctcgtcaagaaagaacttgttcgcatggtgcaggatgtattagaatcggcatggcgcgaactggtgtcg

SEQ ID NO: 366 - protein, 343 aa, synthetic construct
  REGION 1..343: note = variant of RNA ligase 2 from Escherichia phage RB69 (Bacteriophage RB69)
MHHHHHHGGSGMFKKYSSLENHYNSKFIEKLYANGLTDGVWVAREKIHGTNFSLIIERDNVTCAKRTGPIKPAEDFYGYEIVLKKYDKAIKTVQKFMYTAGAVSYQVFGEFAGNGIWKGVDYGEKDFYVFDILINTESGDNTYLTDYEMQDFCNEFGFKMAPMLGRGTFDSLIMIPNDFDSVLMHYNATAKEDLVKANNCVFDANVIGDNTAEGYVLKPCEPKWLPNGTRVAIKCKNSKFSEKKKSDKPIKTQVPLTEIDKNLLDVLACYVTLNRVNNVISKIGTVTPKDFGKVMGLTVQDILEETSREGIVLTTSDNPDLVKKELVRMVQDVLESAWRELVS

SEQ ID NO: 367 - DNA, 1029 bp, synthetic construct
  misc_feature 1..1029: note = variant of RNA ligase 2 from Escherichia phage RB69 (Bacteriophage RB69)
  source 1..1029: mol_type = other DNA
atgcatcaccatcaccatcacggtggcagcggtatgtttaagaaatattctagtctggaaaaccattacaatagcaaattcattgagaaactctatgctaacggcttaactgatggtgtatgggttgcgcgcgaaaagatccacgggacgaacttttcgctgattatcgagcgtgataatgtaacatgcgccaaacgtacaggcccgattaagcctgcagaagacttctacggttatgaaatcgtcctgaagaaatacgataaagcgattaagacggtgcagaaatttatgtataccgccggcgcggtttcctaccaagtgttcggagaatttgctggcaacggtatctggaaaggtgtcgattatggcgagaaagacttctatgtgtttgatattctgatccagacggaatcaggagacaacacgtacctgactgattatgaaatgcaggacttctgtaatgaatttgggtttaagatggcaccaatgcttggtcgcggcacattcgatagcctgattatgattccgaacgatttcgattcggttctcatggcttacaatgcaacggcgaaagaggacctggtaaaagcgaacaactgcgtctttgatgccaatgtgatcggtgataacactgctgaaggctatgttcttaaaccgtgtgaacccaaatggttaccgaatgggacgcgtgtggcgatcaaatgcaagaactccaaattcagcgagaagaagaaaagtgacaaaccgatcaagacacaagtcccactgacggaaattgataagaatctgctggacgtattggcctgttacgtcactttaaaccgcgtgaacaacgtgatctctaagattggaacagtgacgccgaaagattttggcaaagtaatgggtctgactgttcaggatattctggaagaaacgtcacgtgagggtattgttctgacgacatcggacaatcctgacctcgtcaagaaagaacttgttcgcatggtgcaggatgtattagaatcggcatggcgcgaactggtgtcg

SEQ ID NO: 368 - protein, 343 aa, synthetic construct
  REGION 1..343: note = variant of RNA ligase 2 from Escherichia phage RB69 (Bacteriophage RB69)
MHHHHHHGGSGMFKKYSSLENHYNSKFIEKLYANGLTDGVWVAREKIHGTNFSLIIERDNVTCAKRTGPIKPAEDFYGYEIVLKKYDKAIKTVQKFMYTAGAVSYQVFGEFAGNGIWKGVDYGEKDFYVFDILIQTESGDNTYLTDYEMQDFCNEFGFKMAPMLGRGTFDSLIMIPNDFDSVLMAYNATAKEDLVKANNCVFDANVIGDNTAEGYVLKPCEPKWLPNGTRVAIKCKNSKFSEKKKSDKPIKTQVPLTEIDKNLLDVLACYVTLNRVNNVISKIGTVTPKDFGKVMGLTVQDILEETSREGIVLTTSDNPDLVKKELVRMVQDVLESAWRELVS

SEQ ID NO: 369 - DNA, 1029 bp, synthetic construct
  misc_feature 1..1029: note = variant of RNA ligase 2 from Escherichia phage RB69 (Bacteriophage RB69)
  source 1..1029: mol_type = other DNA
atgcatcaccatcaccatcacggtggcagcggtatgtttaagaaatattctagtctggaaaaccattacaatagcaaattcattgagaaactctatgctaacggcttaactgatggtgtatgggttgcgcgcgaaaagatccacgggacgaacttttcgctgattatcgagcgtgataatgtaacatgcgccaaacgtacaggcccgattaagcctgcagaagacttctacggttatgaaatcgtcctgaagaaatacgataaagcgattaagatggtgcagaaatttatgtataccgccggcgcggtttcctaccaagtgttcggagaatttgctggcaacggtatctggaaaggtgtcgattatggcgagaaagacttctatgtgtttgatattctgatcaatacggaatcaggagacaacacgtacctgactgattatgaaatgcaggacttctgtaatgaatttgggtttaagatggcaccaatgcttggtcgcggcacattcgatagcctgattatgattccgaacgatttcgattcggttctcatggcttacaatgcaacggcgaaagaggacctggtaaaagcgaacaactgcgtctttgatgccaatgtgatcggtgataacactgctgaaggctatgttcttaaaccgtgtgaacccaaatggttaccgaatgggacgcgtgtggcgatcaaatgcaagaactccaaattcagcgagaagaagaaaagtgacaaaccgatcaagacacaagtcccactgacggaaattgataagaatctgctggacgtattggcctgttacgtcactttaaaccgcgtgaacaacgtgatctctaagattggaacagtgacgccgaaagattttggcaaagtaatgggtctgactgttcaggatattctggaagaaacgtcacgtgagggtattgttctgacgacatcggacaatcctgacctcgtcaagaaagaacttgttcgcatggtgcaggatgtattagaatcggcatggcgcgaactggtgtcg

SEQ ID NO: 370 - protein, 343 aa, synthetic construct
  REGION 1..343: note = variant of RNA ligase 2 from Escherichia phage RB69 (Bacteriophage RB69)
MHHHHHHGGSGMFKKYSSLENHYNSKFIEKLYANGLTDGVWVAREKIHGTNFSLIIERDNVTCAKRTGPIKPAEDFYGYEIVLKKYDKAIKMVQKFMYTAGAVSYQVFGEFAGNGIWKGVDYGEKDFYVFDILINTESGDNTYLTDYEMQDFCNEFGFKMAPMLGRGTFDSLIMIPNDFDSVLMAYNATAKEDLVKANNCVFDANVIGDNTAEGYVLKPCEPKWLPNGTRVAIKCKNSKFSEKKKSDKPIKTQVPLTEIDKNLLDVLACYVTLNRVNNVISKIGTVTPKDFGKVMGLTVQDILEETSREGIVLTTSDNPDLVKKELVRMVQDVLESAWRELVS

SEQ ID NO: 371 - DNA, 1029 bp, synthetic construct
  misc_feature 1..1029: note = variant of RNA ligase 2 from Escherichia phage RB69 (Bacteriophage RB69)
  source 1..1029: mol_type = other DNA
atgcatcaccatcaccatcacggtggcagcggtatgtttaagaaatattctagtctggaaaaccattacaatagcaaattcattgagaaactctatgctaacggcttaactgatggtgtatgggttgcgcgcgaaaagatccacgggacgaacttttcgctgattatcgagcgtgataatgtaacatgcgccaaacgtacaggcccgattaagcctgcagaagacttctacggttatgaaatcgtcctgaagaaatacgataaagcgattaagacggtgcagaaatttatgtataccgccggcgcggtttcctaccaagtgttcggagaatttgctggcaacggtatctggaaaggtgtcgattatggcgagaaagacttctatgtgtttgatattctgatcaatacggaatcaggagacaacacgtacctgactgattatgaaatgcaggacttctgtaatgaatttgggtttaagatggcaccaatgcttggtcgcggcacattcgatagcctgattatgattccgaacgatttcgattcggttctcatggcttacaatgcaacggcgaaagaggacctggtaaaagcgaacaactgcgtctttgatgccaatgtgatcggtgataacactgctgaaggctatgttcttaaaccgtgtgaacccaaatggttaccgaatgggacgcgtgtggcgatcaaatgcaagaactccaaattcagcgagaagaagaaaagtgacaaaccgatcaagacacaagtcccactgacggaaattgataagaatctgctggacgtattggcctgttacgtcactttaaaccgcgtgaacaacgtgatctctaagattggaacagtgacggctaaagattttggcaaagtaatgggtctgactgttcaggatattctggaagaaacgtcacgtgagggtattgttctgacgacatcggacaatcctgacctcgtcaagaaagaacttgttcgcatggtgcaggatgtattagaatcggcatggcgcgaactggtgtcg

SEQ ID NO: 372 - protein, 343 aa, synthetic construct
  REGION 1..343: note = variant of RNA ligase 2 from Escherichia phage RB69 (Bacteriophage RB69)
MHHHHHHGGSGMFKKYSSLENHYNSKFIEKLYANGLTDGVWVAREKIHGTNFSLIIERDNVTCAKRTGPIKPAEDFYGYEIVLKKYDKAIKTVQKFMYTAGAVSYQVFGEFAGNGIWKGVDYGEKDFYVFDILINTESGDNTYLTDYEMQDFCNEFGFKMAPMLGRGTFDSLIMIPNDFDSVLMAYNATAKEDLVKANNCVFDANVIGDNTAEGYVLKPCEPKWLPNGTRVAIKCKNSKFSEKKKSDKPIKTQVPLTEIDKNLLDVLACYVTLNRVNNVISKIGTVTAKDFGKVMGLTVQDILEETSREGIVLTTSDNPDLVKKELVRMVQDVLESAWRELVS

SEQ ID NO: 373 - DNA, 1029 bp, synthetic construct
  misc_feature 1..1029: note = variant of RNA ligase 2 from Escherichia phage RB69 (Bacteriophage RB69)
  source 1..1029: mol_type = other DNA
atgcatcaccatcaccatcacggtggcagcggtatgtttaagaaatattctagtctggaaaaccattacaatagcaaattcattgagaaactctatgctaacggcttaactgatggtgtatgggttgcgcgcgaaaagatccacgggacgaacttttcgctgattatcgagcgtgataatgtaacatgcgccaaacgtacaggcccgattaagcctgcagaagacttctacggttatgaaatcgtcctgaagaaatacgataaagcgattaagaatgtgcagaaatttatgtataccgccggcgcggtttcctaccaagtgttcggagaatttgctggcaacggtatctggaaaggtgtcgattatggcgagaaagacttctatgtgtttgatattctgatcaatacggaatcaggagacaacacgtacctgactgattatgaaatgcaggacttctgtaatgaatttgggtttaagatggcaccaatgcttggtcgcggcacattcgatagcctgattatgattccgaacgatttcgattcggttctcatggcttacaatgcaacggcgaaagaggacctggtaaaagcgaacaactgcgtctttgatgccaatgtgatcggtgataacactgctgaaggctatgttcttaaaccgtgtgaacccaaatggttaccgaatgggacgcgtgtggcgatcaaatgcaagaactccaaattcagcgagaagaagaaaagtgacaaaccgatcaagacacaagtcccactgacggaaattgataagaatctgctggacgtattggcctgttacgtcactttaaaccgcgtgaacaacgtgatctctaagattggaacagtgacgccgaaagattttggcaaagtaatgggtctgactgttcaggatattctggaagaaacgtcacgtgagggtattgttctgacgacatcggacaatcctgacctcgtcaagaaagaacttgttcgcatggtgcaggatgtattagaatcggcatggcgcgaactggtgtcg

SEQ ID NO: 374 - protein, 343 aa, synthetic construct
  REGION 1..343: note = variant of RNA ligase 2 from Escherichia phage RB69 (Bacteriophage RB69)
MHHHHHHGGSGMFKKYSSLENHYNSKFIEKLYANGLTDGVWVAREKIHGTNFSLIIERDNVTCAKRTGPIKPAEDFYGYEIVLKKYDKAIKNVQKFMYTAGAVSYQVFGEFAGNGIWKGVDYGEKDFYVFDILINTESGDNTYLTDYEMQDFCNEFGFKMAPMLGRGTFDSLIMIPNDFDSVLMAYNATAKEDLVKANNCVFDANVIGDNTAEGYVLKPCEPKWLPNGTRVAIKCKNSKFSEKKKSDKPIKTQVPLTEIDKNLLDVLACYVTLNRVNNVISKIGTVTPKDFGKVMGLTVQDILEETSREGIVLTTSDNPDLVKKELVRMVQDVLESAWRELVS

SEQ ID NO: 375 - DNA, 1029 bp, synthetic construct
  misc_feature 1..1029: note = variant of RNA ligase 2 from Escherichia phage RB69 (Bacteriophage RB69)
  source 1..1029: mol_type = other DNA
atgcatcaccatcaccatcacggtggcagcggtatgttttggaaatattctagtctggaaaaccattacaatagcaaattcattgagaaactctatgctaacggcttaactgatggtgtatgggttgcgcgcgaaaagatccacgggacgaacttttcgctgattatcgagcgtgataatgtaacatgcgccaaacgtacaggcccgattaagcctgcagaagacttctacggttatgaaatcgtcctgaagaaatacgataaagcgattaagacggtgcagaaatttatgtataccgccggcgcggtttcctaccaagtgttcggagaatttgctggcaacggtatctggaaaggtgtcgattatggcgagaaagacttctatgtgtttgatattctgatcaatacggaatcaggagacaacacgtacctgactgattatgaaatgcaggacttctgtaatgaatttgggtttaagatggcaccaatgcttggtcgcggcacattcgatagcctgattatgattccgaacgatttcgattcggttctcatggcttacaatgcaacggcgaaagaggacctggtaaaagcgaacaactgcgtctttgatgccaatgtgatcggtgataacactgctgaaggctatgttcttaaaccgtgtgaacccaaatggttaccgaatgggacgcgtgtggcgatcaaatgcaagaactccaaattcagcgagaagaagaaaagtgacaaaccgatcaagacacaagtcccactgacggaaattgataagaatctgctggacgtattggcctgttacgtcactttaaaccgcgtgaacaacgtgatctctaagattggaacagtgacgccgaaagattttggcaaagtaatgggtctgactgttcaggatattctggaagaaacgtcacgtgagggtattgttctgacgacatcggacaatcctgacctcgtcaagaaagaacttgttcgcatggtgcaggatgtattagaatcggcatggcgcgaactggtgtcg

SEQ ID NO: 376 - protein, 343 aa, synthetic construct
  REGION 1..343: note = variant of RNA ligase 2 from Escherichia phage RB69 (Bacteriophage RB69)
MHHHHHHGGSGMFWKYSSLENHYNSKFIEKLYANGLTDGVWVAREKIHGTNFSLIIERDNVTCAKRTGPIKPAEDFYGYEIVLKKYDKAIKTVQKFMYTAGAVSYQVFGEFAGNGIWKGVDYGEKDFYVFDILINTESGDNTYLTDYEMQDFCNEFGFKMAPMLGRGTFDSLIMIPNDFDSVLMAYNATAKEDLVKANNCVFDANVIGDNTAEGYVLKPCEPKWLPNGTRVAIKCKNSKFSEKKKSDKPIKTQVPLTEIDKNLLDVLACYVTLNRVNNVISKIGTVTPKDFGKVMGLTVQDILEETSREGIVLTTSDNPDLVKKELVRMVQDVLESAWRELVS

SEQ ID NO: 377 - DNA, 1029 bp, synthetic construct
  misc_feature 1..1029: note = variant of RNA ligase 2 from Escherichia phage RB69 (Bacteriophage RB69)
  source 1..1029: mol_type = other DNA
atgcatcaccatcaccatcacggtggcagcggtatgtttaagaaatattctagtctggaaaaccattacaatagcaaattcattgagaaactctatgctaacggcttaactgatggtgtatgggttgcgcgcgaaaagatccacgggacgaacttttcgctgattatcgagcgtgataatgtaacatgcgccaaacgtacaggcccgattaagcctgcagaagacttctacggttatgaaatcgtcctgaagaaatacgataaagcgattaagacggtgcagaaatttatgtataccgccggcgcggtttcctaccaagtgttcggagaatttgctggcaacggtatcaagaaaactgtcgattatggcgagaaagacttctatgtgtttgatattctgatcaatacggaatcaggagacaacacgtacctgactgattatgaaatgcaggacttctgtaatgaatttgggtttaagatggcaccaatgcttggtcgcggcacattcgatagcctgattatgattccgaacgatttcgattcggttctcatggcttacaatgcaacggcgaaagaggacctggtaaaagcgaacaactgcgtctttgatgccaatgtgatcggtgataacactgctgaaggctatgttcttaaaccgtgtgaacccaaatggttaccgaatgggacgcgtgtggcgatcaaatgcaagaactccaaattcagcgagaagaagaaaagtgacaaaccgatcaagacacaagtcccactgacggaaattgataagaatctgctggacgtattggcctgttacgtcactttaaaccgcgtgaacaacgtgatctctaagattggaacagtgacgccgaaagattttggcaaagtaatgggtctgactgttcaggatattctggaagaaacgtcacgtgagggtattgttctgacgacatcggacaatcctgacctcgtcaagaaagaacttgttcgcatggtgcaggatgtattagaatcggcatggcgcgaactggtgtcg

SEQ ID NO: 378 - protein, 343 aa, synthetic construct
  REGION 1..343: note = variant of RNA ligase 2 from Escherichia phage RB69 (Bacteriophage RB69)
MHHHHHHGGSGMFKKYSSLENHYNSKFIEKLYANGLTDGVWVAREKIHGTNFSLIIERDNVTCAKRTGPIKPAEDFYGYEIVLKKYDKAIKTVQKFMYTAGAVSYQVFGEFAGNGIKKTVDYGEKDFYVFDILINTESGDNTYLTDYEMQDFCNEFGFKMAPMLGRGTFDSLIMIPNDFDSVLMAYNATAKEDLVKANNCVFDANVIGDNTAEGYVLKPCEPKWLPNGTRVAIKCKNSKFSEKKKSDKPIKTQVPLTEIDKNLLDVLACYVTLNRVNNVISKIGTVTPKDFGKVMGLTVQDILEETSREGIVLTTSDNPDLVKKELVRMVQDVLESAWRELVS

SEQ ID NO: 379 - DNA, 1029 bp, synthetic construct
  misc_feature 1..1029: note = variant of RNA ligase 2 from Escherichia phage RB69 (Bacteriophage RB69)
  source 1..1029: mol_type = other DNA
atgcatcaccatcaccatcacggtggcagcggtatgtttaagaaatattctagtctggaaaaccattacaatagcaaattcattgagaaactctatgctaacggcttaactgatggtgtatgggttgcgcgcgaaaagatccacgggacgaacttttcgctgattatcgagcgtgataatgtaacatgcgccaaacgtacaggcccgattaagcctgcagaagacttctacggttatgaaatcgtcctgaagaaatacgataaagcgattaagagtgtgcagaaatttatgtataccgccggcgcggtttcctaccaagtgttcggagaatttgctggcaacggtatctggaaaggtgtcgattatggcgagaaagacttctatgtgtttgatattctgatcaatacggaatcaggagacaacacgtacctgactgattatgaaatgcaggacttctgtaatgaatttgggtttaagatggcaccaatgcttggtcgcggcacattcgatagcctgattatgattccgaacgatttcgattcggttctcatggcttacaatgcaacggcgaaagaggacctggtaaaagcgaacaactgcgtctttgatgccaatgtgatcggtgataacactgctgaaggctatgttcttaaaccgtgtgaacccaaatggttaccgaatgggacgcgtgtggcgatcaaatgcaagaactccaaattcagcgagaagaagaaaagtgacaaaccgatcaagacacaagtcccactgacggaaattgataagaatctgctggacgtattggcctgttacgtcactttaaaccgcgtgaacaacgtgatctctaagattggaacagtgacgccgaaagattttggcaaagtaatgggtctgactgttcaggatattctggaagaaacgtcacgtgagggtattgttctgacgacatcggacaatcctgacctcgtcaagaaagaacttgttcgcatggtgcaggatgtattagaatcggcatggcgcgaactggtgtcg

SEQ ID NO: 380 - protein, 343 aa, synthetic construct
  REGION 1..343: note = variant of RNA ligase 2 from Escherichia phage RB69 (Bacteriophage RB69)
MHHHHHHGGSGMFKKYSSLENHYNSKFIEKLYANGLTDGVWVAREKIHGTNFSLIIERDNVTCAKRTGPIKPAEDFYGYEIVLKKYDKAIKSVQKFMYTAGAVSYQVFGEFAGNGIWKGVDYGEKDFYVFDILINTESGDNTYLTDYEMQDFCNEFGFKMAPMLGRGTFDSLIMIPNDFDSVLMAYNATAKEDLVKANNCVFDANVIGDNTAEGYVLKPCEPKWLPNGTRVAIKCKNSKFSEKKKSDKPIKTQVPLTEIDKNLLDVLACYVTLNRVNNVISKIGTVTPKDFGKVMGLTVQDILEETSREGIVLTTSDNPDLVKKELVRMVQDVLESAWRELVS

SEQ ID NO: 381 - DNA, 1029 bp, synthetic construct
  misc_feature 1..1029: note = variant of RNA ligase 2 from Escherichia phage RB69 (Bacteriophage RB69)
  source 1..1029: mol_type = other DNA
atgcatcaccatcaccatcacggtggcagcggtatgtttaagaaatattctagtctggaaaaccattacaatagcaaattcattgagaaactctatgctaacggcttaactgatggtgtatgggttgcgcgcgaaaagatccacgggacgaacttttcgctgattatcgagcgtgataatgtaacatgcgccaaacgtacaggcccgattaagcctgcagaagacttctacggttatgaaatcgtcctgaagaaatacgataaagcgattaagggggtgcagaaatttatgtataccgccggcgcggtttcctaccaagtgttcggagaatttgctggcaacggtatctggaaaggtgtcgattatggcgagaaagacttctatgtgtttgatattctgatcaatacggaatcaggagacaacacgtacctgactgattatgaaatgcaggacttctgtaatgaatttgggtttaagatggcaccaatgcttggtcgcggcacattcgatagcctgattatgattccgaacgatttcgattcggttctcatggcttacaatgcaacggcgaaagaggacctggtaaaagcgaacaactgcgtctttgatgccaatgtgatcggtgataacactgctgaaggctatgttcttaaaccgtgtgaacccaaatggttaccgaatgggacgcgtgtggcgatcaaatgcaagaactccaaattcagcgagaagaagaaaagtgacaaaccgatcaagacacaagtcccactgacggaaattgataagaatctgctggacgtattggcctgttacgtcactttaaaccgcgtgaacaacgtgatctctaagattggaacagtgacgccgaaagattttggcaaagtaatgggtctgactgttcaggatattctggaagaaacgtcacgtgagggtattgttctgacgacatcggacaatcctgacctcgtcaagaaagaacttgttcgcatggtgcaggatgtattagaatcggcatggcgcgaactggtgtcg

SEQ ID NO: 382 - protein, 343 aa, synthetic construct
  REGION 1..343: note = variant of RNA ligase 2 from Escherichia phage RB69 (Bacteriophage RB69)
MHHHHHHGGSGMFKKYSSLENHYNSKFIEKLYANGLTDGVWVAREKIHGTNFSLIIERDNVTCAKRTGPIKPAEDFYGYEIVLKKYDKAIKGVQKFMYTAGAVSYQVFGEFAGNGIWKGVDYGEKDFYVFDILINTESGDNTYLTDYEMQDFCNEFGFKMAPMLGRGTFDSLIMIPNDFDSVLMAYNATAKEDLVKANNCVFDANVIGDNTAEGYVLKPCEPKWLPNGTRVAIKCKNSKFSEKKKSDKPIKTQVPLTEIDKNLLDVLACYVTLNRVNNVISKIGTVTPKDFGKVMGLTVQDILEETSREGIVLTTSDNPDLVKKELVRMVQDVLESAWRELVS

SEQ ID NO: 383 - DNA, 1029 bp, synthetic construct
  misc_feature 1..1029: note = variant of RNA ligase 2 from Escherichia phage RB69 (Bacteriophage RB69)
  source 1..1029: mol_type = other DNA
atgcatcaccatcaccatcacggtggcagcggtatgtttaagaaatattctagtctggaaaaccattacaatagcaaattcattgagaaactctatgctaacggcttaactgatggtgtatgggttgcgcgcgaaaagatccacgggacgaacttttcgctgattatcgagcgtgataatgtaacatgcgccaaacgtacaggcccgattaagcctgcagaagacttctacggttatgaaatcgtcctgaagaaatacgataaagcgattaagacggtgcagaaatttatgtataccgccggcgcggtttcctaccaagtgttcggagaatttgctggcaacggtatcaagaaaggtcctgattatggcgagaaagacttctatgtgtttgatattctgatcaatacggaatcaggagacaacacgtacctgactgattatgaaatgcaggacttctgtaatgaatttgggtttaagatggcaccaatgcttggtcgcggcacattcgatagcctgattatgattccgaacgatttcgattcggttctcatggcttacaatgcaacggcgaaagaggacctggtaaaagcgaacaactgcgtctttgatgccaatgtgatcggtgataacactgctgaaggctatgttcttaaaccgtgtgaacccaaatggttaccgaatgggacgcgtgtggcgatcaaatgcaagaactccaaattcagcgagaagaagaaaagtgacaaaccgatcaagacacaagtcccactgacggaaattgataagaatctgctggacgtattggcctgttacgtcactttaaaccgcgtgaacaacgtgatctctaagattggaacagtgacgccgaaagattttggcaaagtaatgggtctgactgttcaggatattctggaagaaacgtcacgtgagggtattgttctgacgacatcggacaatcctgacctcgtcaagaaagaacttgttcgcatggtgcaggatgtattagaatcggcatggcgcgaactggtgtcg

SEQ ID NO: 384 - protein, 343 aa, synthetic construct
  REGION 1..343: note = variant of RNA ligase 2 from Escherichia phage RB69 (Bacteriophage RB69)
MHHHHHHGGSGMFKKYSSLENHYNSKFIEKLYANGLTDGVWVAREKIHGTNFSLIIERDNVTCAKRTGPIKPAEDFYGYEIVLKKYDKAIKTVQKFMYTAGAVSYQVFGEFAGNGIKKGPDYGEKDFYVFDILINTESGDNTYLTDYEMQDFCNEFGFKMAPMLGRGTFDSLIMIPNDFDSVLMAYNATAKEDLVKANNCVFDANVIGDNTAEGYVLKPCEPKWLPNGTRVAIKCKNSKFSEKKKSDKPIKTQVPLTEIDKNLLDVLACYVTLNRVNNVISKIGTVTPKDFGKVMGLTVQDILEETSREGIVLTTSDNPDLVKKELVRMVQDVLESAWRELVS

SEQ ID NO: 385 - DNA, 1029 bp, synthetic construct
  misc_feature 1..1029: note = variant of RNA ligase 2 from Escherichia phage RB69 (Bacteriophage RB69)
  source 1..1029: mol_type = other DNA
atgcatcaccatcaccatcacggtggcagcggtatgtttaagaaatattctagtctggaaaaccattacaatagcaaattcattgagaaactctatgctaacggcttaactgatggtgtatgggttgcgcgcgaaaagatccacgggacgaacttttcgctgattatcgagcgtgataatgtaacatgcgccaaacgtacaggcccgattaagcctgcagaagacttctacggttgggaaatcgtcctgaagaaatacgataaagcgattaagacggtgcagaaatttatgtataccgccggcgcggtttcctaccaagtgttcggagaatttgctggcaacggtatctggaaaggtgtcgattatggcgagaaagacttctatgtgtttgatattctgatcaatacggaatcaggagacaacacgtacctgactgattatgaaatgcaggacttctgtaatgaatttgggtttaagatggcaccaatgcttggtcgcggcacattcgatagcctgattatgattccgaacgatttcgattcggttctcatggcttacaatgcaacggcgaaagaggacctggtaaaagcgaacaactgcgtctttgatgccaatgtgatcggtgataacactgctgaaggctatgttcttaaaccgtgtgaacccaaatggttaccgaatgggacgcgtgtggcgatcaaatgcaagaactccaaattcagcgagaagaagaaaagtgacaaaccgatcaagacacaagtcccactgacggaaattgataagaatctgctggacgtattggcctgttacgtcactttaaaccgcgtgaacaacgtgatctctaagattggaacagtgacgccgaaagattttggcaaagtaatgggtctgactgttcaggatattctggaagaaacgtcacgtgagggtattgttctgacgacatcggacaatcctgacctcgtcaagaaagaacttgttcgcatggtgcaggatgtattagaatcggcatggcgcgaactggtgtcg

SEQ ID NO: 386 - protein, 343 aa, synthetic construct
  REGION 1..343: note = variant of RNA ligase 2 from Escherichia phage RB69 (Bacteriophage RB69)
MHHHHHHGGSGMFKKYSSLENHYNSKFIEKLYANGLTDGVWVAREKIHGTNFSLIIERDNVTCAKRTGPIKPAEDFYGWEIVLKKYDKAIKTVQKFMYTAGAVSYQVFGEFAGNGIWKGVDYGEKDFYVFDILINTESGDNTYLTDYEMQDFCNEFGFKMAPMLGRGTFDSLIMIPNDFDSVLMAYNATAKEDLVKANNCVFDANVIGDNTAEGYVLKPCEPKWLPNGTRVAIKCKNSKFSEKKKSDKPIKTQVPLTEIDKNLLDVLACYVTLNRVNNVISKIGTVTPKDFGKVMGLTVQDILEETSREGIVLTTSDNPDLVKKELVRMVQDVLESAWRELVS

SEQ ID NO: 387 - DNA, 1029 bp, synthetic construct
  misc_feature 1..1029: note = variant of RNA ligase 2 from Escherichia phage RB69 (Bacteriophage RB69)
  source 1..1029: mol_type = other DNA
atgcatcaccatcaccatcacggtggcagcggtatgtttaagaaatattctagtctggaaaaccattacaatagcaaattcattgagaaactctatgctaacggcttaactgatggtgtatgggttgcgcgcgaaaagatccacgggacgaacttttcgctgattatcgagcgtgataatgtaacatgcgccaaacgtacaggcccgattaagcctgcagaagacttctacggttatgaaatcgtcctgaagaaatacgataaagcgattaagacggtgcagaaatttatgtatacccggggcgcggtttcctaccaagtgttcggagaatttgctggcaacggtatctggaaaggtgtcgattatggcgagaaagacttctatgtgtttgatattctgatcaatacggaatcaggagacaacacgtacctgactgattatgaaatgcaggacttctgtaatgaatttgggtttaagatggcaccaatgcttggtcgcggcacattcgatagcctgattatgattccgaacgatttcgattcggttctcatggcttacaatgcaacggcgaaagaggacctggtaaaagcgaacaactgcgtctttgatgccaatgtgatcggtgataacactgctgaaggctatgttcttaaaccgtgtgaacccaaatggttaccgaatgggacgcgtgtggcgatcaaatgcaagaactccaaattcagcgagaagaagaaaagtgacaaaccgatcaagacacaagtcccactgacggaaattgataagaatctgctggacgtattggcctgttacgtcactttaaaccgcgtgaacaacgtgatctctaagattggaacagtgacgccgaaagattttggcaaagtaatgggtctgactgttcaggatattctggaagaaacgtcacgtgagggtattgttctgacgacatcggacaatcctgacctcgtcaagaaagaacttgttcgcatggtgcaggatgtattagaatcggcatggcgcgaactggtgtcg

SEQ ID NO: 388 - protein, 343 aa, synthetic construct
  REGION 1..343: note = variant of RNA ligase 2 from Escherichia phage RB69 (Bacteriophage RB69)
MHHHHHHGGSGMFKKYSSLENHYNSKFIEKLYANGLTDGVWVAREKIHGTNFSLIIERDNVTCAKRTGPIKPAEDFYGYEIVLKKYDKAIKTVQKFMYTRGAVSYQVFGEFAGNGIWKGVDYGEKDFYVFDILINTESGDNTYLTDYEMQDFCNEFGFKMAPMLGRGTFDSLIMIPNDFDSVLMAYNATAKEDLVKANNCVFDANVIGDNTAEGYVLKPCEPKWLPNGTRVAIKCKNSKFSEKKKSDKPIKTQVPLTEIDKNLLDVLACYVTLNRVNNVISKIGTVTPKDFGKVMGLTVQDILEETSREGIVLTTSDNPDLVKKELVRMVQDVLESAWRELVS

SEQ ID NO: 389 - DNA, 1029 bp, synthetic construct
  misc_feature 1..1029: note = variant of RNA ligase 2 from Escherichia phage RB69 (Bacteriophage RB69)
  source 1..1029: mol_type = other DNA
atgcatcaccatcaccatcacggtggcagcggtatgtttaagaaatattctagtctggaaaaccattacaatagcaaattcattgagaaactctatgctaacggcttaactgatggtgtatgggttgcgcgcgaaaagatccacgggacgaacttttcgctgattatcgagcgtgataatgtaacatgcgccaaacgtacaggcccgattaagcctgcagaagacttctacggttatgaaatcgtcctgaagaaatacgataaagcgattaagacggtgcagaaatttatgtataccgccggcgcggtttcctaccaagtgttcggagaatttgctggcaacggtatctggaaaggtgtcgattatggcgagaaagacttctatgtgtttgatattctgatcaatacggaatcaggagacaacacgtacctgactgattatgaaatgcaggacttctgtaatgaatttgggtttaagatggcaccaatgcttggtcgcggcacattcgatagcctgattatgattccgaacgatttcgattcggttctcatggcttacaatgcaacggcgaaagaggacctggtaaaagcgaacaactgcgtctttgatgccaatgtgatcggtgataacactgctgaaggctatgttcttaaaccgtgtgaacccaaatggttaccgaatgggacgcgtgtggcgatcaaatgcaagaactccaaattcagcgagaagaagaaaagtgacaaaccgatcaagacacaagtcccactgacggaaattgataagaatctgctggacgtattggcctgttacgtcactttaaaccgcgtgaacaacgtgatctctaagattggaacagtggcgccgaaagattttggcaaagtaatgggtctgactgttcaggatattctggaagaaacgtcacgtgagggtattgttctgacgacatcggacaatcctgacctcgtcaagaaagaacttgttcgcatggtgcaggatgtattagaatcggcatggcgcgaactggtgtcg

SEQ ID NO: 390 - protein, 343 aa, synthetic construct
  REGION 1..343: note = variant of RNA ligase 2 from Escherichia phage RB69 (Bacteriophage RB69)
MHHHHHHGGSGMFKKYSSLENHYNSKFIEKLYANGLTDGVWVAREKIHGTNFSLIIERDNVTCAKRTGPIKPAEDFYGYEIVLKKYDKAIKTVQKFMYTAGAVSYQVFGEFAGNGIWKGVDYGEKDFYVFDILINTESGDNTYLTDYEMQDFCNEFGFKMAPMLGRGTFDSLIMIPNDFDSVLMAYNATAKEDLVKANNCVFDANVIGDNTAEGYVLKPCEPKWLPNGTRVAIKCKNSKFSEKKKSDKPIKTQVPLTEIDKNLLDVLACYVTLNRVNNVISKIGTVAPKDFGKVMGLTVQDILEETSREGIVLTTSDNPDLVKKELVRMVQDVLESAWRELVS

SEQ ID NO: 391 - DNA, 1029 bp, synthetic construct
  misc_feature 1..1029: note = variant of RNA ligase 2 from Escherichia phage RB69 (Bacteriophage RB69)
  source 1..1029: mol_type = other DNA
atgcatcaccatcaccatcacggtggcagcggtatgtttaagaaatattctagtctggaaaaccattacaatagcaaattcattgagaaactctatgctaacggcttaactgatggtgtatgggttgcgcgcgaaaagatccacgggacgaacttttcgctgattatcgagcgtgataatgtaacatgcgccaaacgtacaggcccgattaagcctgcagaagacttctacggttatgaaatcgtcctgaagaaatacgataaagcgattaagacggtgcagaaatttatgtataccgccggcgcggtttcctaccaagtgttcggagaatttgctggcaacggtatcaagaaagaggtcgattatggcgagaaagacttctatgtgtttgatattctgatcaatacggaatcaggagacaacacgtacctgactgattatgaaatgcaggacttctgtaatgaatttgggtttaagatggcaccaatgcttggtcgcggcacattcgatagcctgattatgattccgaacgatttcgattcggttctcatggcttacaatgcaacggcgaaagaggacctggtaaaagcgaacaactgcgtctttgatgccaatgtgatcggtgataacactgctgaaggctatgttcttaaaccgtgtgaacccaaatggttaccgaatgggacgcgtgtggcgatcaaatgcaagaactccaaattcagcgagaagaagaaaagtgacaaaccgatcaagacacaagtcccactgacggaaattgataagaatctgctggacgtattggcctgttacgtcactttaaaccgcgtgaacaacgtgatctctaagattggaacagtgacgccgaaagattttggcaaagtaatgggtctgactgttcaggatattctggaagaaacgtcacgtgagggtattgttctgacgacatcggacaatcctgacctcgtcaagaaagaacttgttcgcatggtgcaggatgtattagaatcggcatggcgcgaactggtgtcg

SEQ ID NO: 392 - protein, 343 aa, synthetic construct
  REGION 1..343: note = variant of RNA ligase 2 from Escherichia phage RB69 (Bacteriophage RB69)
MHHHHHHGGSGMFKKYSSLENHYNSKFIEKLYANGLTDGVWVAREKIHGTNFSLIIERDNVTCAKRTGPIKPAEDFYGYEIVLKKYDKAIKTVQKFMYTAGAVSYQVFGEFAGNGIKKEVDYGEKDFYVFDILINTESGDNTYLTDYEMQDFCNEFGFKMAPMLGRGTFDSLIMIPNDFDSVLMAYNATAKEDLVKANNCVFDANVIGDNTAEGYVLKPCEPKWLPNGTRVAIKCKNSKFSEKKKSDKPIKTQVPLTEIDKNLLDVLACYVTLNRVNNVISKIGTVTPKDFGKVMGLTVQDILEETSREGIVLTTSDNPDLVKKELVRMVQDVLESAWRELVS

SEQ ID NO: 393 - DNA, 1029 bp, synthetic construct
  misc_feature 1..1029: note = variant of RNA ligase 2 from Escherichia phage RB69 (Bacteriophage RB69)
  source 1..1029: mol_type = other DNA
atgcatcaccatcaccatcacggtggcagcggtatgtttaagaaatattctagtctggaaaaccattacaatagcaaattcattgagaaactctatgctaacggcttaactgatggtgtatgggttgcgcgcgaaaagatccacgggacgaacttttcgctgattatcgagcgtgataatgtaacatgcgccaaacgtacaggcccgattaagcctgcagaagacttctacggttatgaaatcgtcctgaagaaatacgataaagcgattaagacggtgcagaaatttatgtataccgccggcgcggtttcctaccaagtgttcggagaatttgctggcaacggtatctggaaaggtgtcgattatggcgagaaagacttctatgtgtttgatattctgatcaatacggaatcaggagacaacacgtacctgactgattatgaaatgcaggacttctgtaatgaatttgggtttaagatggcaccaatgcttggtcgcggcacattcgatagcctgattatgattccgaacgatttcgattcggttctcatggcttacaatgcaacggcgaaagaggacctggtaaaagcgaacaactgcgtctttgatgccaatgtgatcggtgataacactgctgaaggctatgttcttaaaccgtgtgaacccaaatggttaccgaatgggacgcgtgtggcgatcaaatgcaagaactccaaattcagcgagaagaagaaaagtgacaaaccgatcaagacacaagtcccactgacggaaattgataagaatctgctggacgtattggcctgttacgtcactttaaaccgcgtgaacaacgtgatctctaagattggaacagtgacgccgaaagattttggcaaagtaatggtgctgactgttcaggatattctggaagaaacgtcacgtgagggtattgttctgacgacatcggacaatcctgacctcgtcaagaaagaacttgttcgcatggtgcaggatgtattagaatcggcatggcgcgaactggtgtcg

SEQ ID NO: 394 - protein, 343 aa, synthetic construct
  REGION 1..343: note = variant of RNA ligase 2 from Escherichia phage RB69 (Bacteriophage RB69)
MHHHHHHGGSGMFKKYSSLENHYNSKFIEKLYANGLTDGVWVAREKIHGTNFSLIIERDNVTCAKRTGPIKPAEDFYGYEIVLKKYDKAIKTVQKFMYTAGAVSYQVFGEFAGNGIWKGVDYGEKDFYVFDILINTESGDNTYLTDYEMQDFCNEFGFKMAPMLGRGTFDSLIMIPNDFDSVLMAYNATAKEDLVKANNCVFDANVIGDNTAEGYVLKPCEPKWLPNGTRVAIKCKNSKFSEKKKSDKPIKTQVPLTEIDKNLLDVLACYVTLNRVNNVISKIGTVTPKDFGKVMVLTVQDILEETSREGIVLTTSDNPDLVKKELVRMVQDVLESAWRELVS

SEQ ID NO: 395 - DNA, 1029 bp, synthetic construct
  misc_feature 1..1029: note = variant of RNA ligase 2 from Escherichia phage RB69 (Bacteriophage RB69)
  source 1..1029: mol_type = other DNA
atgcatcaccatcaccatcacggtggcagcggtatgtttaagaaatattctagtctggaaaaccattacaatagcaaattcattgagaaactctatgctaacggcttaactgatggtgtatgggttgcgcgcgaaaagatccacgggacgaacttttcgctgattatcgagcgtgataatgtaacatgcgccaaacgtacaggcccgattaagcctgcagaagacttctacggttatgaaatcgtcctgaagaaatacgataaagcgattaagacggtgcagaaatttatgtataccgccggcgcggtttcctaccaagtgttcggagaatttgctggcaacggtatctggaaaggtgtcgattatggcgagaaagacttctatgtgtttgatattctgatcaatacggaatcaggagacaacacgtacctgactgattatgaaatgcaggacttctgtaatgaatttgggtttaagatggcaccaatgcttggtcgcggcacattcgatagcctgattatgattccgaacgatttcgattcggttctcatggcttacaatgcaacggcgaaagaggacctggtaaaagcgaacaactgcgtctttgatgccaatgtgatcggtgataacactgctgaaggctatgttcttaaaccgtgtgaacccaaatggttaccgaatgggacgcgtgtggcgatcaaatgcaagaactccaaattcagcgagaagaagaaaagtgacaaaccgatcaagacacaagtcccactgacggaaattgataagaatctgctggacgtattggcctgttacgtcactttaaaccgcgtgaacaacgtgatctctaagattggaacagtgacgccgaaagattttgagaaagtaatgggtctgactgttcaggatattctggaagaaacgtcacgtgagggtattgttctgacgacatcggacaatcctgacctcgtcaagaaagaacttgttcgcatggtgcaggatgtattagaatcggcatggcgcgaactggtgtcg

SEQ ID NO: 396 - protein, 343 aa, synthetic construct
  REGION 1..343: note = variant of RNA ligase 2 from Escherichia phage RB69 (Bacteriophage RB69)
MHHHHHHGGSGMFKKYSSLENHYNSKFIEKLYANGLTDGVWVAREKIHGTNFSLIIERDNVTCAKRTGPIKPAEDFYGYEIVLKKYDKAIKTVQKFMYTAGAVSYQVFGEFAGNGIWKGVDYGEKDFYVFDILINTESGDNTYLTDYEMQDFCNEFGFKMAPMLGRGTFDSLIMIPNDFDSVLMAYNATAKEDLVKANNCVFDANVIGDNTAEGYVLKPCEPKWLPNGTRVAIKCKNSKFSEKKKSDKPIKTQVPLTEIDKNLLDVLACYVTLNRVNNVISKIGTVTPKDFEKVMGLTVQDILEETSREGIVLTTSDNPDLVKKELVRMVQDVLESAWRELVS

SEQ ID NO: 397 - DNA, 1029 bp, synthetic construct
  misc_feature 1..1029: note = variant of RNA ligase 2 from Escherichia phage RB69 (Bacteriophage RB69)
  source 1..1029: mol_type = other DNA
atgcatcaccatcaccatcacggtggcagcggtatgtttaagaaatattctagtctggaaaaccattacaatagccatttcattgagaaactctatgctaacggcttaactgatggtgtatgggttgcgcgcgaaaagatccacgggacgaacttttcgctgattatcgagcgtgataatgtaacatgcgccaaacgtacaggcccgattaagcctgcagaagacttctacggttatgaaatcgtcctgaagaaatacgataaagcgattaagacggtgcagaaatttatgtataccgccggcgcggtttcctaccaagtgttcggagaatttgctggcaacggtatctggaaaggtgtcgattatggcgagaaagacttctatgtgtttgatattctgatcaatacggaatcaggagacaacacgtacctgactgattatgaaatgcaggacttctgtaatgaatttgggtttaagatggcaccaatgcttggtcgcggcacattcgatagcctgattatgattccgaacgatttcgattcggttctcatggcttacaatgcaacggcgaaagaggacctggtaaaagcgaacaactgcgtctttgatgccaatgtgatcggtgataacactgctgaaggctatgttcttaaaccgtgtgaacccaaatggttaccgaatgggacgcgtgtggcgatcaaatgcaagaactccaaattcagcgagaagaagaaaagtgacaaaccgatcaagacacaagtcccactgacggaaattgataagaatctgctggacgtattggcctgttacgtcactttaaaccgcgtgaacaacgtgatctctaagattggaacagtgacgccgaaagattttggcaaagtaatgggtctgactgttcaggatattctggaagaaacgtcacgtgagggtattgttctgacgacatcggacaatcctgacctcgtcaagaaagaacttgttcgcatggtgcaggatgtattagaatcggcatggcgcgaactggtgtcg

SEQ ID NO: 398 - protein, 343 aa, synthetic construct
  REGION 1..343: note = variant of RNA ligase 2 from Escherichia phage RB69 (Bacteriophage RB69)
MHHHHHHGGSGMFKKYSSLENHYNSHFIEKLYANGLTDGVWVAREKIHGTNFSLIIERDNVTCAKRTGPIKPAEDFYGYEIVLKKYDKAIKTVQKFMYTAGAVSYQVFGEFAGNGIWKGVDYGEKDFYVFDILINTESGDNTYLTDYEMQDFCNEFGFKMAPMLGRGTFDSLIMIPNDFDSVLMAYNATAKEDLVKANNCVFDANVIGDNTAEGYVLKPCEPKWLPNGTRVAIKCKNSKFSEKKKSDKPIKTQVPLTEIDKNLLDVLACYVTLNRVNNVISKIGTVTPKDFGKVMGLTVQDILEETSREGIVLTTSDNPDLVKKELVRMVQDVLESAWRELVS

SEQ ID NO: 399 - DNA, 1029 bp, synthetic construct
  misc_feature 1..1029: note = variant of RNA ligase 2 from Escherichia phage RB69 (Bacteriophage RB69)
  source 1..1029: mol_type = other DNA
atgcatcaccatcaccatcacggtggcagcggtatgtttaagaaatattctagtctggaaaaccattacaatagcaaattcattgagaaactctatgctaacggcttaactgatggtgtatgggttgcgcgcgaaaagatccacgggacgaacttttcgctgattatcgagcgtgataatgtaacatgcgccaaacgtacaggcccgattaagcctgcagaagacttctacggttatgaaatcgtcctgaagaaatacgataaagcgattaagacggtgcagaaatttatgtataccgccggcgcggtttcctaccaagtgttcggagaatttgctggcaacggtatctggaaaggtgtcgattatggcgagaaagacttctatgtgtttgatattctgatcaatacggaatcaggagacaacacgtacctgactgattatgaaatgcaggacttctgtaatgaatttgggtttaagatggcaccaatgcttggtcgcggcacattcgatagcctgattatgattccgaacgatttcgattcggttctcatggcttacaatgcaacggcgaaagaggacctggtaaaagcgaacaactgcgtctttgatgccaatgtgatcggtgataacactgctgaaggctatgttcttaaaccgtgtgaacccaaatggttaccgaatgggacgcgtgtggcgatcaaatgcaagaactccaaattcagcgagaagaagaaaagtgacaaaccgatcaagacacaagtcccactgacggaaattgataagaatctgctggacgtattggcctgttacgtcactttaaaccgcgtgaacaacgtgatctctaagattggaacagtgacgccgaaagattttggcaaagtaatgtggctgactgttcaggatattctggaagaaacgtcacgtgagggtattgttctgacgacatcggacaatcctgacctcgtcaagaaagaacttgttcgcatggtgcaggatgtattagaatcggcatggcgcgaactggtgtcg

SEQ ID NO: 400 - protein, 343 aa, synthetic construct
  REGION 1..343: note = variant of RNA ligase 2 from Escherichia phage RB69 (Bacteriophage RB69)
MHHHHHHGGSGMFKKYSSLENHYNSKFIEKLYANGLTDGVWVAREKIHGTNFSLIIERDNVTCAKRTGPIKPAEDFYGYEIVLKKYDKAIKTVQKFMYTAGAVSYQVFGEFAGNGIWKGVDYGEKDFYVFDILINTESGDNTYLTDYEMQDFCNEFGFKMAPMLGRGTFDSLIMIPNDFDSVLMAYNATAKEDLVKANNCVFDANVIGDNTAEGYVLKPCEPKWLPNGTRVAIKCKNSKFSEKKKSDKPIKTQVPLTEIDKNLLDVLACYVTLNRVNNVISKIGTVTPKDFGKVMWLTVQDILEETSREGIVLTTSDNPDLVKKELVRMVQDVLESAWRELVS

SEQ ID NO: 401 - DNA, 1029 bp, synthetic construct
  misc_feature 1..1029: note = variant of RNA ligase 2 from Escherichia phage RB69 (Bacteriophage RB69)
  source 1..1029: mol_type = other DNA
atgcatcaccatcaccatcacggtggcagcggtatgtttaagaaatattctagtctggaaaaccattacaatagcaaattcattgagcatctctatgctaacggcttaactgatggtgtatgggttgcgcgcgaaaagatccacgggacgaacttttcgctgattatcgagcgtgataatgtaacatgcgccaaacgtacaggcccgattaagcctgcagaagacttctacggttatgaaatcgtcctgaagaaatacgataaagcgattaagacggtgcagaaatttatgtataccgccggcgcggtttcctaccaagtgttcggagaatttgctggcaacggtatctggaaaggtgtcgattatggcgagaaagacttctatgtgtttgatattctgatcaatacggaatcaggagacaacacgtacctgactgattatgaaatgcaggacttctgtaatgaatttgggtttaagatggcaccaatgcttggtcgcggcacattcgatagcctgattatgattccgaacgatttcgattcggttctcatggcttacaatgcaacggcgaaagaggacctggtaaaagcgaacaactgcgtctttgatgccaatgtgatcggtgataacactgctgaaggctatgttcttaaaccgtgtgaacccaaatggttaccgaatgggacgcgtgtggcgatcaaatgcaagaactccaaattcagcgagaagaagaaaagtgacaaaccgatcaagacacaagtcccactgacggaaattgataagaatctgctggacgtattggcctgttacgtcactttaaaccgcgtgaacaacgtgatctctaagattggaacagtgacgccgaaagattttggcaaagtaatgggtctgactgttcaggatattctggaagaaacgtcacgtgagggtattgttctgacgacatcggacaatcctgacctcgtcaagaaagaacttgttcgcatggtgcaggatgtattagaatcggcatggcgcgaactggtgtcg

SEQ ID NO: 402 - protein, 343 aa, synthetic construct
  REGION 1..343: note = variant of RNA ligase 2 from Escherichia phage RB69 (Bacteriophage RB69)
MHHHHHHGGSGMFKKYSSLENHYNSKFIEHLYANGLTDGVWVAREKIHGTNFSLIIERDNVTCAKRTGPIKPAEDFYGYEIVLKKYDKAIKTVQKFMYTAGAVSYQVFGEFAGNGIWKGVDYGEKDFYVFDILINTESGDNTYLTDYEMQDFCNEFGFKMAPMLGRGTFDSLIMIPNDFDSVLMAYNATAKEDLVKANNCVFDANVIGDNTAEGYVLKPCEPKWLPNGTRVAIKCKNSKFSEKKKSDKPIKTQVPLTEIDKNLLDVLACYVTLNRVNNVISKIGTVTPKDFGKVMGLTVQDILEETSREGIVLTTSDNPDLVKKELVRMVQDVLESAWRELVS

SEQ ID NO: 403 - DNA, 1029 bp, synthetic construct
  misc_feature 1..1029: note = variant of RNA ligase 2 from Escherichia phage RB69 (Bacteriophage RB69)
  source 1..1029: mol_type = other DNA
atgcatcaccatcaccatcacggtggcagcggtatgtttaagaaatattctagtctggaaaaccattacaatagcgggttcattgagaaactctatgctaacggcttaactgatggtgtatgggttgcgcgcgaaaagatccacgggacgaacttttcgctgattatcgagcgtgataatgtaacatgcgccaaacgtacaggcccgattaagcctgcagaagacttctacggttatgaaatcgtcctgaagaaatacgataaagcgattaagacggtgcagaaatttatgtataccgccggcgcggtttcctaccaagtgttcggagaatttgctggcaacggtatctggaaaggtgtcgattatggcgagaaagacttctatgtgtttgatattctgatcaatacggaatcaggagacaacacgtacctgactgattatgaaatgcaggacttctgtaatgaatttgggtttaagatggcaccaatgcttggtcgcggcacattcgatagcctgattatgattccgaacgatttcgattcggttctcatggcttacaatgcaacggcgaaagaggacctggtaaaagcgaacaactgcgtctttgatgccaatgtgatcggtgataacactgctgaaggctatgttcttaaaccgtgtgaacccaaatggttaccgaatgggacgcgtgtggcgatcaaatgcaagaactccaaattcagcgagaagaagaaaagtgacaaaccgatcaagacacaagtcccactgacggaaattgataagaatctgctggacgtattggcctgttacgtcactttaaaccgcgtgaacaacgtgatctctaagattggaacagtgacgccgaaagattttggcaaagtaatgggtctgactgttcaggatattctggaagaaacgtcacgtgagggtattgttctgacgacatcggacaatcctgacctcgtcaagaaagaacttgttcgcatggtgcaggatgtattagaatcggcatggcgcgaactggtgtcg

SEQ ID NO: 404 - protein, 343 aa, synthetic construct
  REGION 1..343: note = variant of RNA ligase 2 from Escherichia phage RB69 (Bacteriophage RB69)
MHHHHHHGGSGMFKKYSSLENHYNSGFIEKLYANGLTDGVWVAREKIHGTNFSLIIERDNVTCAKRTGPIKPAEDFYGYEIVLKKYDKAIKTVQKFMYTAGAVSYQVFGEFAGNGIWKGVDYGEKDFYVFDILINTESGDNTYLTDYEMQDFCNEFGFKMAPMLGRGTFDSLIMIPNDFDSVLMAYNATAKEDLVKANNCVFDANVIGDNTAEGYVLKPCEPKWLPNGTRVAIKCKNSKFSEKKKSDKPIKTQVPLTEIDKNLLDVLACYVTLNRVNNVISKIGTVTPKDFGKVMGLTVQDILEETSREGIVLTTSDNPDLVKKELVRMVQDVLESAWRELVS

SEQ ID NO: 405 - DNA, 1029 bp, synthetic construct
  misc_feature 1..1029: note = variant of RNA ligase 2 from Escherichia phage RB69 (Bacteriophage RB69)
  source 1..1029: mol_type = other DNA
atgcatcaccatcaccatcacggtggcagcggtatgtttaagaaatattctagtctggaaaaccattacaatagcaaattcattgaggcgctctatgctaacggcttaactgatggtgtatgggttgcgcgcgaaaagatccacgggacgaacttttcgctgattatcgagcgtgataatgtaacatgcgccaaacgtacaggcccgattaagcctgcagaagacttctacggttatgaaatcgtcctgaagaaatacgataaagcgattaagacggtgcagaaatttatgtataccgccggcgcggtttcctaccaagtgttcggagaatttgctggcaacggtatctggaaaggtgtcgattatggcgagaaagacttctatgtgtttgatattctgatcaatacggaatcaggagacaacacgtacctgactgattatgaaatgcaggacttctgtaatgaatttgggtttaagatggcaccaatgcttggtcgcggcacattcgatagcctgattatgattccgaacgatttcgattcggttctcatggcttacaatgcaacggcgaaagaggacctggtaaaagcgaacaactgcgtctttgatgccaatgtgatcggtgataacactgctgaaggctatgttcttaaaccgtgtgaacccaaatggttaccgaatgggacgcgtgtggcgatcaaatgcaagaactccaaattcagcgagaagaagaaaagtgacaaaccgatcaagacacaagtcccactgacggaaattgataagaatctgctggacgtattggcctgttacgtcactttaaaccgcgtgaacaacgtgatctctaagattggaacagtgacgccgaaagattttggcaaagtaatgggtctgactgttcaggatattctggaagaaacgtcacgtgagggtattgttctgacgacatcggacaatcctgacctcgtcaagaaagaacttgttcgcatggtgcaggatgtattagaatcggcatggcgcgaactggtgtcg

SEQ ID NO: 406 - protein, 343 aa, synthetic construct
  REGION 1..343: note = variant of RNA ligase 2 from Escherichia phage RB69 (Bacteriophage RB69)
MHHHHHHGGSGMFKKYSSLENHYNSKFIEALYANGLTDGVWVAREKIHGTNFSLIIERDNVTCAKRTGPIKPAEDFYGYEIVLKKYDKAIKTVQKFMYTAGAVSYQVFGEFAGNGIWKGVDYGEKDFYVFDILINTESGDNTYLTDYEMQDFCNEFGFKMAPMLGRGTFDSLIMIPNDFDSVLMAYNATAKEDLVKANNCVFDANVIGDNTAEGYVLKPCEPKWLPNGTRVAIKCKNSKFSEKKKSDKPIKTQVPLTEIDKNLLDVLACYVTLNRVNNVISKIGTVTPKDFGKVMGLTVQDILEETSREGIVLTTSDNPDLVKKELVRMVQDVLESAWRELVS

SEQ ID NO: 407 - DNA, 1029 bp, synthetic construct
  misc_feature 1..1029: note = variant of RNA ligase 2 from Escherichia phage RB69 (Bacteriophage RB69)
  source 1..1029: mol_type = other DNA
atgcatcaccatcaccatcacggtggcagcggtatgtttaagaaatattctagtctggaaaaccattacaattggaaattcattgagaaactctatgctaacggcttaactgatggtgtatgggttgcgcgcgaaaagatccacgggacgaacttttcgctgattatcgagcgtgataatgtaacatgcgccaaacgtacaggcccgattaagcctgcagaagacttctacggttatgaaatcgtcctgaagaaatacgataaagcgattaagacggtgcagaaatttatgtataccgccggcgcggtttcctaccaagtgttcggagaatttgctggcaacggtatctggaaaggtgtcgattatggcgagaaagacttctatgtgtttgatattctgatcaatacggaatcaggagacaacacgtacctgactgattatgaaatgcaggacttctgtaatgaatttgggtttaagatggcaccaatgcttggtcgcggcacattcgatagcctgattatgattccgaacgatttcgattcggttctcatggcttacaatgcaacggcgaaagaggacctggtaaaagcgaacaactgcgtctttgatgccaatgtgatcggtgataacactgctgaaggctatgttcttaaaccgtgtgaacccaaatggttaccgaatgggacgcgtgtggcgatcaaatgcaagaactccaaattcagcgagaagaagaaaagtgacaaaccgatcaagacacaagtcccactgacggaaattgataagaatctgctggacgtattggcctgttacgtcactttaaaccgcgtgaacaacgtgatctctaagattggaacagtgacgccgaaagattttggcaaagtaatgggtctgactgttcaggatattctggaagaaacgtcacgtgagggtattgttctgacgacatcggacaatcctgacctcgtcaagaaagaacttgttcgcatggtgcaggatgtattagaatcggcatggcgcgaactggtgtcg

SEQ ID NO: 408 - protein, 343 aa, synthetic construct
  REGION 1..343: note = variant of RNA ligase 2 from Escherichia phage RB69 (Bacteriophage RB69)
MHHHHHHGGSGMFKKYSSLENHYNWKFIEKLYANGLTDGVWVAREKIHGTNFSLIIERDNVTCAKRTGPIKPAEDFYGYEIVLKKYDKAIKTVQKFMYTAGAVSYQVFGEFAGNGIWKGVDYGEKDFYVFDILINTESGDNTYLTDYEMQDFCNEFGFKMAPMLGRGTFDSLIMIPNDFDSVLMAYNATAKEDLVKANNCVFDANVIGDNTAEGYVLKPCEPKWLPNGTRVAIKCKNSKFSEKKKSDKPIKTQVPLTEIDKNLLDVLACYVTLNRVNNVISKIGTVTPKDFGKVMGLTVQDILEETSREGIVLTTSDNPDLVKKELVRMVQDVLESAWRELVS

SEQ ID NO: 409 - DNA, 1029 bp, synthetic construct
  misc_feature 1..1029: note = variant of RNA ligase 2 from Escherichia phage RB69 (Bacteriophage RB69)
  source 1..1029: mol_type = other DNA
atgcatcaccatcaccatcacggtggcagcggtatgtttaagaaatattctagtctggaaaaccattacaatttgaaattcattgagaaactctatgctaacggcttaactgatggtgtatgggttgcgcgcgaaaagatccacgggacgaacttttcgctgattatcgagcgtgataatgtaacatgcgccaaacgtacaggcccgattaagcctgcagaagacttctacggttatgaaatcgtcctgaagaaatacgataaagcgattaagacggtgcagaaatttatgtataccgccggcgcggtttcctaccaagtgttcggagaatttgctggcaacggtatctggaaaggtgtcgattatggcgagaaagacttctatgtgtttgatattctgatcaatacggaatcaggagacaacacgtacctgactgattatgaaatgcaggacttctgtaatgaatttgggtttaagatggcaccaatgcttggtcgcggcacattcgatagcctgattatgattccgaacgatttcgattcggttctcatggcttacaatgcaacggcgaaagaggacctggtaaaagcgaacaactgcgtctttgatgccaatgtgatcggtgataacactgctgaaggctatgttcttaaaccgtgtgaacccaaatggttaccgaatgggacgcgtgtggcgatcaaatgcaagaactccaaattcagcgagaagaagaaaagtgacaaaccgatcaagacacaagtcccactgacggaaattgataagaatctgctggacgtattggcctgttacgtcactttaaaccgcgtgaacaacgtgatctctaagattggaacagtgacgccgaaagattttggcaaagtaatgggtctgactgttcaggatattctggaagaaacgtcacgtgagggtattgttctgacgacatcggacaatcctgacctcgtcaagaaagaacttgttcgcatggtgcaggatgtattagaatcggcatggcgcgaactggtgtcg

SEQ ID NO: 410 - protein, 343 aa, synthetic construct
  REGION 1..343: note = variant of RNA ligase 2 from Escherichia phage RB69 (Bacteriophage RB69)
MHHHHHHGGSGMFKKYSSLENHYNLKFIEKLYANGLTDGVWVAREKIHGTNFSLIIERDNVTCAKRTGPIKPAEDFYGYEIVLKKYDKAIKTVQKFMYTAGAVSYQVFGEFAGNGIWKGVDYGEKDFYVFDILINTESGDNTYLTDYEMQDFCNEFGFKMAPMLGRGTFDSLIMIPNDFDSVLMAYNATAKEDLVKANNCVFDANVIGDNTAEGYVLKPCEPKWLPNGTRVAIKCKNSKFSEKKKSDKPIKTQVPLTEIDKNLLDVLACYVTLNRVNNVISKIGTVTPKDFGKVMGLTVQDILEETSREGIVLTTSDNPDLVKKELVRMVQDVLESAWRELVS

SEQ ID NO: 411 - DNA, 1029 bp, synthetic construct
  misc_feature 1..1029: note = variant of RNA ligase 2 from Escherichia phage RB69 (Bacteriophage RB69)
  source 1..1029: mol_type = other DNA
atgcatcaccatcaccatcacggtggcagcggtatgtttaagaaatattctagtctggaaaaccattacaatagcgtgttcattgagaaactctatgctaacggcttaactgatggtgtatgggttgcgcgcgaaaagatccacgggacgaacttttcgctgattatcgagcgtgataatgtaacatgcgccaaacgtacaggcccgattaagcctgcagaagacttctacggttatgaaatcgtcctgaagaaatacgataaagcgattaagacggtgcagaaatttatgtataccgccggcgcggtttcctaccaagtgttcggagaatttgctggcaacggtatctggaaaggtgtcgattatggcgagaaagacttctatgtgtttgatattctgatcaatacggaatcaggagacaacacgtacctgactgattatgaaatgcaggacttctgtaatgaatttgggtttaagatggcaccaatgcttggtcgcggcacattcgatagcctgattatgattccgaacgatttcgattcggttctcatggcttacaatgcaacggcgaaagaggacctggtaaaagcgaacaactgcgtctttgatgccaatgtgatcggtgataacactgctgaaggctatgttcttaaaccgtgtgaacccaaatggttaccgaatgggacgcgtgtggcgatcaaatgcaagaactccaaattcagcgagaagaagaaaagtgacaaaccgatcaagacacaagtcccactgacggaaattgataagaatctgctggacgtattggcctgttacgtcactttaaaccgcgtgaacaacgtgatctctaagattggaacagtgacgccgaaagattttggcaaagtaatgggtctgactgttcaggatattctggaagaaacgtcacgtgagggtattgttctgacgacatcggacaatcctgacctcgtcaagaaagaacttgttcgcatggtgcaggatgtattagaatcggcatggcgcgaactggtgtcg

SEQ ID NO: 412 - protein, 343 aa, synthetic construct
  REGION 1..343: note = variant of RNA ligase 2 from Escherichia phage RB69 (Bacteriophage RB69)
MHHHHHHGGSGMFKKYSSLENHYNSVFIEKLYANGLTDGVWVAREKIHGTNFSLIIERDNVTCAKRTGPIKPAEDFYGYEIVLKKYDKAIKTVQKFMYTAGAVSYQVFGEFAGNGIWKGVDYGEKDFYVFDILINTESGDNTYLTDYEMQDFCNEFGFKMAPMLGRGTFDSLIMIPNDFDSVLMAYNATAKEDLVKANNCVFDANVIGDNTAEGYVLKPCEPKWLPNGTRVAIKCKNSKFSEKKKSDKPIKTQVPLTEIDKNLLDVLACYVTLNRVNNVISKIGTVTPKDFGKVMGLTVQDILEETSREGIVLTTSDNPDLVKKELVRMVQDVLESAWRELVS

SEQ ID NO: 413 - DNA, 1029 bp, synthetic construct
  misc_feature 1..1029: note = variant of RNA ligase 2 from Escherichia phage RB69 (Bacteriophage RB69)
  source 1..1029: mol_type = other DNA
atgcatcaccatcaccatcacggtggcagcggtatgtttaagaaatattctagtctggaaaaccattacaatagccttttcattgagaaactctatgctaacggcttaactgatggtgtatgggttgcgcgcgaaaagatccacgggacgaacttttcgctgattatcgagcgtgataatgtaacatgcgccaaacgtacaggcccgattaagcctgcagaagacttctacggttatgaaatcgtcctgaagaaatacgataaagcgattaagacggtgcagaaatttatgtataccgccggcgcggtttcctaccaagtgttcggagaatttgctggcaacggtatctggaaaggtgtcgattatggcgagaaagacttctatgtgtttgatattctgatcaatacggaatcaggagacaacacgtacctgactgattatgaaatgcaggacttctgtaatgaatttgggtttaagatggcaccaatgcttggtcgcggcacattcgatagcctgattatgattccgaacgatttcgattcggttctcatggcttacaatgcaacggcgaaagaggacctggtaaaagcgaacaactgcgtctttgatgccaatgtgatcggtgataacactgctgaaggctatgttcttaaaccgtgtgaacccaaatggttaccgaatgggacgcgtgtggcgatcaaatgcaagaactccaaattcagcgagaagaagaaaagtgacaaaccgatcaagacacaagtcccactgacggaaattgataagaatctgctggacgtattggcctgttacgtcactttaaaccgcgtgaacaacgtgatctctaagattggaacagtgacgccgaaagattttggcaaagtaatgggtctgactgttcaggatattctggaagaaacgtcacgtgagggtattgttctgacgacatcggacaatcctgacctcgtcaagaaagaacttgttcgcatggtgcaggatgtattagaatcggcatggcgcgaactggtgtcg

SEQ ID NO: 414 - protein, 343 aa, synthetic construct
  REGION 1..343: note = variant of RNA ligase 2 from Escherichia phage RB69 (Bacteriophage RB69)
MHHHHHHGGSGMFKKYSSLENHYNSLFIEKLYANGLTDGVWVAREKIHGTNFSLIIERDNVTCAKRTGPIKPAEDFYGYEIVLKKYDKAIKTVQKFMYTAGAVSYQVFGEFAGNGIWKGVDYGEKDFYVFDILINTESGDNTYLTDYEMQDFCNEFGFKMAPMLGRGTFDSLIMIPNDFDSVLMAYNATAKEDLVKANNCVFDANVIGDNTAEGYVLKPCEPKWLPNGTRVAIKCKNSKFSEKKKSDKPIKTQVPLTEIDKNLLDVLACYVTLNRVNNVISKIGTVTPKDFGKVMGLTVQDILEETSREGIVLTTSDNPDLVKKELVRMVQDVLESAWRELVS

SEQ ID NO: 415 - DNA, 1029 bp, synthetic construct
  misc_feature 1..1029: note = variant of RNA ligase 2 from Escherichia phage RB69 (Bacteriophage RB69)
  source 1..1029: mol_type = other DNA
atgcatcaccatcaccatcacggtggcagcggtatgtttaagaaatattctagtctggaaaaccattacaatagcaaattcattgagaaactctatgctaacggcttaactgatggtgtatgggttgcgcgcgaaaagatccacgggacgaacttttcgctgattatcgagcgtgataatgtaacatgcgccaaacgtacaggcccgattaagcctgcagaagacttctacggttatgaaatcgtcctgaagaaatacgataaagcgattaaggaggtgcagaaatttatgtataccgccggcgcggtttcctaccaagtgttcggagaatttgctggcaacggtatctggaaaggtgtcgattatggcgagaaagacttctatgtgtttgatattctgatcaatacggaatcaggagacaacacgtacctgactgattatgaaatgcaggacttctgtaatgaatttgggtttaagatggcaccaatgcttggtcgcggcacattcgatagcctgattatgattccgaacgatttcgattcggttctcatggcttacaatgcaacggcgaaagaggacctggtaaaagcgaacaactgcgtctttgatgccaatgtgatcggtgataacactgctgaaggctatgttcttaaaccgtgtgaacccaaatggttaccgaatgggacgcgtgtggcgatcaaatgcaagaactccaaattcagcgagaagaagaaaagtgacaaaccgatcaagacacaagtcccactgacggaaattgataagaatctgctggacgtattggcctgttacgtcactttaaaccgcgtgaacaacgtgatctctaagattggaacagtgacgccgaaagattttggcaaagtaatgggtctgactgttcaggatattctggaagaaacgtcacgtgagggtattgttctgacgacatcggacaatcctgacctcgtcaagaaagaacttgttcgcatggtgcaggatgtattagaatcggcatggcgcgaactggtgtcg

SEQ ID NO: 416 - protein, 343 aa, synthetic construct
  REGION 1..343: note = variant of RNA ligase 2 from Escherichia phage RB69 (Bacteriophage RB69)
MHHHHHHGGSGMFKKYSSLENHYNSKFIEKLYANGLTDGVWVAREKIHGTNFSLIIERDNVTCAKRTGPIKPAEDFYGYEIVLKKYDKAIKEVQKFMYTAGAVSYQVFGEFAGNGIWKGVDYGEKDFYVFDILINTESGDNTYLTDYEMQDFCNEFGFKMAPMLGRGTFDSLIMIPNDFDSVLMAYNATAKEDLVKANNCVFDANVIGDNTAEGYVLKPCEPKWLPNGTRVAIKCKNSKFSEKKKSDKPIKTQVPLTEIDKNLLDVLACYVTLNRVNNVISKIGTVTPKDFGKVMGLTVQDILEETSREGIVLTTSDNPDLVKKELVRMVQDVLESAWRELVS

SEQ ID NO: 417 - DNA, 1029 bp, synthetic construct
  misc_feature 1..1029: note = variant of RNA ligase 2 from Escherichia phage RB69 (Bacteriophage RB69)
  source 1..1029: mol_type = other DNA
atgcatcaccatcaccatcacggtggcagcggtatgtttacgaaatattctagtctggaaaaccattacaatagcaaattcattgagaaactctatgctaacggcttaactgatggtgtatgggttgcgcgcgaaaagatccacgggacgaacttttcgctgattatcgagcgtgataatgtaacatgcgccaaacgtacaggcccgattaagcctgcagaagacttctacggttatgaaatcgtcctgaagaaatacgataaagcgattaagacggtgcagaaatttatgtataccgccggcgcggtttcctaccaagtgttcggagaatttgctggcaacggtatctggaaaggtgtcgattatggcgagaaagacttctatgtgtttgatattctgatcaatacggaatcaggagacaacacgtacctgactgattatgaaatgcaggacttctgtaatgaatttgggtttaagatggcaccaatgcttggtcgcggcacattcgatagcctgattatgattccgaacgatttcgattcggttctcatggcttacaatgcaacggcgaaagaggacctggtaaaagcgaacaactgcgtctttgatgccaatgtgatcggtgataacactgctgaaggctatgttcttaaaccgtgtgaacccaaatggttaccgaatgggacgcgtgtggcgatcaaatgcaagaactccaaattcagcgagaagaagaaaagtgacaaaccgatcaagacacaagtcccactgacggaaattgataagaatctgctggacgtattggcctgttacgtcactttaaaccgcgtgaacaacgtgatctctaagattggaacagtgacgccgaaagattttggcaaagtaatgggtctgactgttcaggatattctggaagaaacgtcacgtgagggtattgttctgacgacatcggacaatcctgacctcgtcaagaaagaacttgttcgcatggtgcaggatgtattagaatcggcatggcgcgaactggtgtcg

SEQ ID NO: 418 - protein, 343 aa, synthetic construct
  REGION 1..343: note = variant of RNA ligase 2 from Escherichia phage RB69 (Bacteriophage RB69)
MHHHHHHGGSGMFTKYSSLENHYNSKFIEKLYANGLTDGVWVAREKIHGTNFSLIIERDNVTCAKRTGPIKPAEDFYGYEIVLKKYDKAIKTVQKFMYTAGAVSYQVFGEFAGNGIWKGVDYGEKDFYVFDILINTESGDNTYLTDYEMQDFCNEFGFKMAPMLGRGTFDSLIMIPNDFDSVLMAYNATAKEDLVKANNCVFDANVIGDNTAEGYVLKPCEPKWLPNGTRVAIKCKNSKFSEKKKSDKPIKTQVPLTEIDKNLLDVLACYVTLNRVNNVISKIGTVTPKDFGKVMGLTVQDILEETSREGIVLTTSDNPDLVKKELVRMVQDVLESAWRELVS

SEQ ID NO: 419 - DNA, 1029 bp, synthetic construct
  misc_feature 1..1029: note = variant of RNA ligase 2 from Escherichia phage RB69 (Bacteriophage RB69)
  source 1..1029: mol_type = other DNA
atgcatcaccatcaccatcacggtggcagcggtatgtttaagaaatattctagtctggaaaaccattacaatagcaaattcattgagaaactctatgctaacggcttaactgatggtgtatgggttgcgcgcgaaaagatccacgggacgaacttttcgctgattatcgagcgtgataatgtaacatgcgccaaacgtacaggcccgattaagcctgcagaaacgttctacggttatgaaatcgtcctgaagaaatacgataaagcgattaagacggtgcagaaatttatgtataccgccggcgcggtttcctaccaagtgttcggagaatttgctggcaacggtatctggaaaggtgtcgattatggcgagaaagacttctatgtgtttgatattctgatcaatacggaatcaggagacaacacgtacctgactgattatgaaatgcaggacttctgtaatgaatttgggtttaagatggcaccaatgcttggtcgcggcacattcgatagcctgattatgattccgaacgatttcgattcggttctcatggcttacaatgcaacggcgaaagaggacctggtaaaagcgaacaactgcgtctttgatgccaatgtgatcggtgataacactgctgaaggctatgttcttaaaccgtgtgaacccaaatggttaccgaatgggacgcgtgtggcgatcaaatgcaagaactccaaattcagcgagaagaagaaaagtgacaaaccgatcaagacacaagtcccactgacggaaattgataagaatctgctggacgtattggcctgttacgtcactttaaaccgcgtgaacaacgtgatctctaagattggaacagtgacgccgaaagattttggcaaagtaatgggtctgactgttcaggatattctggaagaaacgtcacgtgagggtattgttctgacgacatcggacaatcctgacctcgtcaagaaagaacttgttcgcatggtgcaggatgtattagaatcggcatggcgcgaactggtgtcg

SEQ ID NO: 420 - protein, 343 aa, synthetic construct
  REGION 1..343: note = variant of RNA ligase 2 from Escherichia phage RB69 (Bacteriophage RB69)
MHHHHHHGGSGMFKKYSSLENHYNSKFIEKLYANGLTDGVWVAREKIHGTNFSLIIERDNVTCAKRTGPIKPAETFYGYEIVLKKYDKAIKTVQKFMYTAGAVSYQVFGEFAGNGIWKGVDYGEKDFYVFDILINTESGDNTYLTDYEMQDFCNEFGFKMAPMLGRGTFDSLIMIPNDFDSVLMAYNATAKEDLVKANNCVFDANVIGDNTAEGYVLKPCEPKWLPNGTRVAIKCKNSKFSEKKKSDKPIKTQVPLTEIDKNLLDVLACYVTLNRVNNVISKIGTVTPKDFGKVMGLTVQDILEETSREGIVLTTSDNPDLVKKELVRMVQDVLESAWRELVS

SEQ ID NO: 421 - DNA, 1029 bp, synthetic construct
  misc_feature 1..1029: note = variant of RNA ligase 2 from Escherichia phage RB69 (Bacteriophage RB69)
  source 1..1029: mol_type = other DNA
atgcatcaccatcaccatcacggtggcagcggtatgtttaagaaatattctagtctggaaaaccattacaatgggaaattcattgagaaactctatgctaacggcttaactgatggtgtatgggttgcgcgcgaaaagatccacgggacgaacttttcgctgattatcgagcgtgataatgtaacatgcgccaaacgtacaggcccgattaagcctgcagaagacttctacggttatgaaatcgtcctgaagaaatacgataaagcgattaagacggtgcagaaatttatgtataccgccggcgcggtttcctaccaagtgttcggagaatttgctggcaacggtatctggaaaggtgtcgattatggcgagaaagacttctatgtgtttgatattctgatcaatacggaatcaggagacaacacgtacctgactgattatgaaatgcaggacttctgtaatgaatttgggtttaagatggcaccaatgcttggtcgcggcacattcgatagcctgattatgattccgaacgatttcgattcggttctcatggcttacaatgcaacggcgaaagaggacctggtaaaagcgaacaactgcgtctttgatgccaatgtgatcggtgataacactgctgaaggctatgttcttaaaccgtgtgaacccaaatggttaccgaatgggacgcgtgtggcgatcaaatgcaagaactccaaattcagcgagaagaagaaaagtgacaaaccgatcaagacacaagtcccactgacggaaattgataagaatctgctggacgtattggcctgttacgtcactttaaaccgcgtgaacaacgtgatctctaagattggaacagtgacgccgaaagattttggcaaagtaatgggtctgactgttcaggatattctggaagaaacgtcacgtgagggtattgttctgacgacatcggacaatcctgacctcgtcaagaaagaacttgttcgcatggtgcaggatgtattagaatcggcatggcgcgaactggtgtcg

SEQ ID NO: 422 - protein, 343 aa, synthetic construct
  REGION 1..343: note = variant of RNA ligase 2 from Escherichia phage RB69 (Bacteriophage RB69)
MHHHHHHGGSGMFKKYSSLENHYNGKFIEKLYANGLTDGVWVAREKIHGTNFSLIIERDNVTCAKRTGPIKPAEDFYGYEIVLKKYDKAIKTVQKFMYTAGAVSYQVFGEFAGNGIWKGVDYGEKDFYVFDILINTESGDNTYLTDYEMQDFCNEFGFKMAPMLGRGTFDSLIMIPNDFDSVLMAYNATAKEDLVKANNCVFDANVIGDNTAEGYVLKPCEPKWLPNGTRVAIKCKNSKFSEKKKSDKPIKTQVPLTEIDKNLLDVLACYVTLNRVNNVISKIGTVTPKDFGKVMGLTVQDILEETSREGIVLTTSDNPDLVKKELVRMVQDVLESAWRELVS

SEQ ID NO: 423 - DNA, 1029 bp, synthetic construct
  misc_feature 1..1029: note = variant of RNA ligase 2 from Escherichia phage RB69 (Bacteriophage RB69)
  source 1..1029: mol_type = other DNA
atgcatcaccatcaccatcacggtggcagcggtatgtttaagaaatattctagtctggaaaaccattacaatagcaaattcattgagaaactctatgctaacggcttaactgatggtgtatgggttgcgcgcgaaaagatccacgggacgaacttttcgctgattatcgagcgtgataatgtaacatgcgccaaacgtacaggcccgattaagcctgcagaagacttctacggttatgaaatcgtcctgaagaaatacgataaagcgattaagacggtgcagaaatttatgtataccgccggcgcggtttcctaccaagtgttcggagaatttgctggcaacggtatctggaaaggtgtcgattatggcgagaaagacttctatgtgtttgatattctgatcaatacggaatcaggagacaacacgtacctgactgattatgaaatgcaggacttctgtaatgaatttgggtttaagatggcaccaatgcttggtcgcggcacattcgatagcctgattatgattccgaacgatttcgattcggttctcatggcttacaatgcaacggcgaaagaggacctggtaaaagcgaacaactgcgtctttgatgccaatgtgatcggtgataacactgctgaaggctatgttcttaaaccgtgtgaacccaaatggttaccgaatgggacgcgtgtggcgatcaaatgcaagaactccaaattcagcgagaagaagaaaagtgacaaaccgatcaagacacaagtcccactgacggaaattgataagaatctgctggacgtattggcctgttacgtcactttaaaccgcgtgaacaacgtgatctctaagattggaacagtgacgccgaaagattttggcaaagtaatgggtctgactgttcaggatattctggaagaaacgtcacgtgagggtattgttctgacgacatcggacaatcctgacctcgtcaagaaagaactttggcgcatggtgcaggatgtattagaatcggcatggcgcgaactggtgtcg

SEQ ID NO: 424 - protein, 343 aa, synthetic construct
  REGION 1..343: note = variant of RNA ligase 2 from Escherichia phage RB69 (Bacteriophage RB69)
MHHHHHHGGSGMFKKYSSLENHYNSKFIEKLYANGLTDGVWVAREKIHGTNFSLIIERDNVTCAKRTGPIKPAEDFYGYEIVLKKYDKAIKTVQKFMYTAGAVSYQVFGEFAGNGIWKGVDYGEKDFYVFDILINTESGDNTYLTDYEMQDFCNEFGFKMAPMLGRGTFDSLIMIPNDFDSVLMAYNATAKEDLVKANNCVFDANVIGDNTAEGYVLKPCEPKWLPNGTRVAIKCKNSKFSEKKKSDKPIKTQVPLTEIDKNLLDVLACYVTLNRVNNVISKIGTVTPKDFGKVMGLTVQDILEETSREGIVLTTSDNPDLVKKELWRMVQDVLESAWRELVS

SEQ ID NO: 425 - DNA, 1029 bp, synthetic construct
  misc_feature 1..1029: note = variant of RNA ligase 2 from Escherichia phage RB69 (Bacteriophage RB69)
  source 1..1029: mol_type = other DNA
atgcatcaccatcaccatcacggtggcagcggtatgtttaagaaatattctagtctggaaaaccattacaatagcaaattcattgagaaactctatgctaacggcttaactgatggtgtatgggttgcgcgcgaaaagatccacgggacgaacttttcgctgattatcgagcgtgataatgtaacatgcgccaaacgtacaggcccgattaagcctgcagaagacttctacggttatgaaatcgtcctgaagaaatacgataaagcgattaagacggtgcagaaatttatgtataccgccggcgcggtttcctaccaagtgttcggagaactggctggcaacggtatctggaaaggtgtcgattatggcgagaaagacttctatgtgtttgatattctgatcaatacggaatcaggagacaacacgtacctgactgattatgaaatgcaggacttctgtaatgaatttgggtttaagatggcaccaatgcttggtcgcggcacattcgatagcctgattatgattccgaacgatttcgattcggttctcatggcttacaatgcaacggcgaaagaggacctggtaaaagcgaacaactgcgtctttgatgccaatgtgatcggtgataacactgctgaaggctatgttcttaaaccgtgtgaacccaaatggttaccgaatgggacgcgtgtggcgatcaaatgcaagaactccaaattcagcgagaagaagaaaagtgacaaaccgatcaagacacaagtcccactgacggaaattgataagaatctgctggacgtattggcctgttacgtcactttaaaccgcgtgaacaacgtgatctctaagattggaacagtgacgccgaaagattttggcaaagtaatgggtctgactgttcaggatattctggaagaaacgtcacgtgagggtattgttctgacgacatcggacaatcctgacctcgtcaagaaagaacttgttcgcatggtgcaggatgtattagaatcggcatggcgcgaactggtgtcg

SEQ ID NO: 426 - protein, 343 aa, synthetic construct
  REGION 1..343: note = variant of RNA ligase 2 from Escherichia phage RB69 (Bacteriophage RB69)
MHHHHHHGGSGMFKKYSSLENHYNSKFIEKLYANGLTDGVWVAREKIHGTNFSLIIERDNVTCAKRTGPIKPAEDFYGYEIVLKKYDKAIKTVQKFMYTAGAVSYQVFGELAGNGIWKGVDYGEKDFYVFDILINTESGDNTYLTDYEMQDFCNEFGFKMAPMLGRGTFDSLIMIPNDFDSVLMAYNATAKEDLVKANNCVFDANVIGDNTAEGYVLKPCEPKWLPNGTRVAIKCKNSKFSEKKKSDKPIKTQVPLTEIDKNLLDVLACYVTLNRVNNVISKIGTVTPKDFGKVMGLTVQDILEETSREGIVLTTSDNPDLVKKELVRMVQDVLESAWRELVS

SEQ ID NO: 427 - DNA, 1029 bp, synthetic construct
  misc_feature 1..1029: note = variant of RNA ligase 2 from Escherichia phage RB69 (Bacteriophage RB69)
  source 1..1029: mol_type = other DNA
atgcatcaccatcaccatcacggtggcagcggtatgtttaagaaatattctagtctggaaaaccattacaatagcaaattcattgagaaactctatgctaacggcttaactgatggtgtatgggttgcgcgcgaaaagatccacgggacgaacttttcgctgattatcgagcgtgataatgtaacatgcgccaaacgtacaggcccgattaagcctgcagaagacttctacggttatgaaatcgtcctgaagaaatacgataaagcgattaagacggtgcagaaatttatgtataccgccggcaccgtttcctaccaagtgttcggagaatttgctggcaacggtatctggaaagaggtcgattatggcgagaaagacttctatgtgtttgatattctgatcaatacggaatcaggagacaacacgtacctgactgattatgaaatgcaggacttctgtaatgaatttgggtttaagatggcaccaatgcttggtcgcggcacattcgatagcctgattatgattccgaacgatttcgattcggttctcatggcttacaatgcaacggcgaaagaggacctggtaaaagcgaacaactgcgtctttgatgccaatgtgatcggtgataacactgctgaaggctatgttcttaaaccgtgtgaacccaaatggttaccgaatgggacgcgtgtggcgatcaaatgcaagaactccaaattcagcgagaagaagaaaagtgacaaaccgatcaagacacaagtcccactgacggaaattgataagaatctgctggacgtattggcctgttatgtcactttaaaccgcgtgaacaacgtgatctctaagattggaacagtgacgccgaaagattttgagaaagtaatgggtctgactgttcaggatattctggaagaaacgtcacgtgagggtattgttctgacgacatcggacaatcctgacctcgtcaagaaagaacttgttcgcatggtgcaggatgtattagaatcggcatggcgcgaactggtgtcg

SEQ ID NO: 428 - protein, 343 aa, synthetic construct
  REGION 1..343: note = variant of RNA ligase 2 from Escherichia phage RB69 (Bacteriophage RB69)
MHHHHHHGGSGMFKKYSSLENHYNSKFIEKLYANGLTDGVWVAREKIHGTNFSLIIERDNVTCAKRTGPIKPAEDFYGYEIVLKKYDKAIKTVQKFMYTAGTVSYQVFGEFAGNGIWKEVDYGEKDFYVFDILINTESGDNTYLTDYEMQDFCNEFGFKMAPMLGRGTFDSLIMIPNDFDSVLMAYNATAKEDLVKANNCVFDANVIGDNTAEGYVLKPCEPKWLPNGTRVAIKCKNSKFSEKKKSDKPIKTQVPLTEIDKNLLDVLACYVTLNRVNNVISKIGTVTPKDFEKVMGLTVQDILEETSREGIVLTTSDNPDLVKKELVRMVQDVLESAWRELVS

SEQ ID NO: 429 - DNA, 1029 bp, synthetic construct
  misc_feature 1..1029: note = variant of RNA ligase 2 from Escherichia phage RB69 (Bacteriophage RB69)
  source 1..1029: mol_type = other DNA
atgcatcaccatcaccatcacggtggcagcggtatgtttaagaaatattctagtctggaaaaccattacaatagcaaattcattgagaaactctatgctaacggcttaactgatggtgtatgggttgcgcgcgaaaagatccacgggacgaacttttcgctgattatcgagcgtgataatgtaacatgcgccaaacgtacaggcccgattaagcctgcagaaaccttctacggttatgaaatcgtcctgaagaaatacgataaagcgattaagacggtgcagaaatttatgtataccgccggcaccgtttcctaccaagtgttcggagaatttgctggcaacggtatctggaaaggtgtcgattatggcgagaaagacttctatgtgtttgatattctgatcaatacggaatcaggagacaacacgtacctgactgattatgaaatgcaggacttctgtaatgaatttgggtttaagatggcaccaatgcttggtcgcggcacattcgatagcctgattatgattccgaacgatttcgattcggttctcatggcttacaatgcaacggcgaaagaggacctggtaaaagcgaacaactgcgtctttgatgccaatgtgatcggtgataacactgctgaaggctatgttcttaaaccgtgtgaacccaaatggttaccgaatgggacgcgtgtggcgatcaaatgcaagaactccaaattcagcgagaagaagaaaagtgacaaaccgatcaagacacaagtcccactgacggaaattgataagaatctgctggacgtattggcctgttatgtcactttaaaccgcgtgaacaacgtgatctctaagattggaacagtgacgccgaaagattttgagaaagtaatgggtctgactgttcaggatattctggaagaaacgtcacgtgagggtattgttctgacgacatcggacaatcctgacctcgtcaagaaagaacttgttcgcatggtgcaggatgtattagaatcggcatggcgcgaactggtgtcg

SEQ ID NO: 430 - protein, 343 aa, synthetic construct
  REGION 1..343: note = variant of RNA ligase 2 from Escherichia phage RB69 (Bacteriophage RB69)
MHHHHHHGGSGMFKKYSSLENHYNSKFIEKLYANGLTDGVWVAREKIHGTNFSLIIERDNVTCAKRTGPIKPAETFYGYEIVLKKYDKAIKTVQKFMYTAGTVSYQVFGEFAGNGIWKGVDYGEKDFYVFDILINTESGDNTYLTDYEMQDFCNEFGFKMAPMLGRGTFDSLIMIPNDFDSVLMAYNATAKEDLVKANNCVFDANVIGDNTAEGYVLKPCEPKWLPNGTRVAIKCKNSKFSEKKKSDKPIKTQVPLTEIDKNLLDVLACYVTLNRVNNVISKIGTVTPKDFEKVMGLTVQDILEETSREGIVLTTSDNPDLVKKELVRMVQDVLESAWRELVS

SEQ ID NO: 431 - DNA, 1029 bp, synthetic construct
  misc_feature 1..1029: note = variant of RNA ligase 2 from Escherichia phage RB69 (Bacteriophage RB69)
  source 1..1029: mol_type = other DNA
atgcatcaccatcaccatcacggtggcagcggtatgtttaagaaatattctagtctggaaaaccattacaatagcaaattcattgagaagctctatgctaacggcttaactgatggtgtatgggttgcgcgcgaaaagatccacgggacgaacttttcgctgattatcgagcgtgataatgtaacatgcgccaaacgtacaggcccgattaagcctgcagaaaccttctacggttatgaaatcgtcctgaagaaatacgataaagcgattaagacggtgcagaaatttatgtataccgccggcaccgtttcctaccaagtgttcggagaatttgctggcaacggtatcatgaaaggggtcgattatggcgagaaagacttctatgtgtttgatattctgatcaatacggaatcaggagacaacacgtacctgactgattatgaaatgcaggacttctgtaatgaatttgggtttaagatggcaccaatgcttggtcgcggcacattcgatagcctgattatgattccgaacgatttcgattcggttctcatggcttacaatgcaacggcgaaagaggacctggtaaaagcgaacaactgcgtctttgatgccaatgtgatcggtgataacactgctgaaggctatgttcttaaaccgtgtgaacccaaatggttaccgaatgggacgcgtgtggcgatcaaatgcaagaactccaaattcagcgagaagaagaaaagtgacaaaccgatcaagacacaagtcccactgacggaaattgataagaatctgctggacgtattggcctgttatgtcactttaaaccgcgtgaacaacgtgatctctaagattggaacagtgacgccgaaagattttgagaaagtaatggggctgactgttcaggatattctggaagaaacgtcacgtgagggtattgttctgacgacatcggacaatcctgacctcgtcaagaaagaacttgttcgcatggtgcaggatgtattagaatcggcatggcgcgaactggtgtcg

SEQ ID NO: 432 - protein, 343 aa, synthetic construct
  REGION 1..343: note = variant of RNA ligase 2 from Escherichia phage RB69 (Bacteriophage RB69)
MHHHHHHGGSGMFKKYSSLENHYNSKFIEKLYANGLTDGVWVAREKIHGTNFSLIIERDNVTCAKRTGPIKPAETFYGYEIVLKKYDKAIKTVQKFMYTAGTVSYQVFGEFAGNGIMKGVDYGEKDFYVFDILINTESGDNTYLTDYEMQDFCNEFGFKMAPMLGRGTFDSLIMIPNDFDSVLMAYNATAKEDLVKANNCVFDANVIGDNTAEGYVLKPCEPKWLPNGTRVAIKCKNSKFSEKKKSDKPIKTQVPLTEIDKNLLDVLACYVTLNRVNNVISKIGTVTPKDFEKVMGLTVQDILEETSREGIVLTTSDNPDLVKKELVRMVQDVLESAWRELVS

SEQ ID NO: 433 - DNA, 1029 bp, synthetic construct
  misc_feature 1..1029: note = variant of RNA ligase 2 from Escherichia phage RB69 (Bacteriophage RB69)
  source 1..1029: mol_type = other DNA
atgcatcaccatcaccatcacggtggcagcggtatgtttaagaaatattctagtctggaaaaccattacaatagcaaattcattgagaaactctatgctaacggcttaactgatggtgtatgggttgcgcgcgaaaagatccacgggacgaacttttcgctgattatcgagcgtgataatgtaacatgcgccaaacgtacaggcccgattaagcctgcagaaaccttctacggttatgaaatcgtcctgaagaaatacgataaagcgattaagacggtgcagaaatttatgtataccgccggcgccgtttcctaccaagtgttcggagaatttgctggcaacggtatctggaaagaggtcgattatggcgagaaagacttctatgtgtttgatattctgatcaatacggaatcaggagacaacacgtacctgactgattatgaaatgcaggacttctgtaatgaatttgggtttaagatggcaccaatgcttggtcgcggcacattcgatagcctgattatgattccgaacgatttcgattcggttctcatggcttacaatgcaacggcgaaagaggacctggtaaaagcgaacaactgcgtctttgatgccaatgtgatcggtgataacactgctgaaggctatgttcttaaaccgtgtgaacccaaatggttaccgaatgggacgcgtgtggcgatcaaatgcaagaactccaaattcagcgagaagaagaaaagtgacaaaccgatcaagacacaagtcccactgacggaaattgataagaatctgctggacgtattggcctgttatgtcactttaaaccgcgtgaacaacgtgatctctaagattggaacagtgacgccgaaagattttgagaaagtaatggggctgactgttcaggatattctggaagaaacgtcacgtgagggtattgttctgacgacatcggacaatcctgacctcgtcaagaaagaacttgtccgcatggtgcaggatgtattagaatcggcatggcgcgaactggtgtcg

SEQ ID NO: 434 - protein, 343 aa, synthetic construct
  REGION 1..343: note = variant of RNA ligase 2 from Escherichia phage RB69 (Bacteriophage RB69)
MHHHHHHGGSGMFKKYSSLENHYNSKFIEKLYANGLTDGVWVAREKIHGTNFSLIIERDNVTCAKRTGPIKPAETFYGYEIVLKKYDKAIKTVQKFMYTAGAVSYQVFGEFAGNGIWKEVDYGEKDFYVFDILINTESGDNTYLTDYEMQDFCNEFGFKMAPMLGRGTFDSLIMIPNDFDSVLMAYNATAKEDLVKANNCVFDANVIGDNTAEGYVLKPCEPKWLPNGTRVAIKCKNSKFSEKKKSDKPIKTQVPLTEIDKNLLDVLACYVTLNRVNNVISKIGTVTPKDFEKVMGLTVQDILEETSREGIVLTTSDNPDLVKKELVRMVQDVLESAWRELVS

SEQ ID NO: 435 - DNA, 1029 bp, synthetic construct
  misc_feature 1..1029: note = variant of RNA ligase 2 from Escherichia phage RB69 (Bacteriophage RB69)
  source 1..1029: mol_type = other DNA
atgcatcaccatcaccatcacggtggcagcggtatgtttaagaaatattctagtctggaaaaccattacaatagcaaattcattgagaaactctatgctaacggcttaactgatggtgtatgggttgcgcgcgaaaagatccacgggacgaacttttcgctgattatcgagcgtgataatgtaacatgcgccaaacgtacaggcccgattaagcctgcagaaaccttctacggttatgaaatcgtcctgaagaaatacgataaagcgattaagacggtgcagaaatttatgtataccgccggcgccgtttcctaccaagtgttcggagaatttgctggcaacggtatctggaaaggggtcgattatggcgagaaagacttctatgtgtttgatattctgatcaatgcggaatcaggagacaacacgtacctgactgattatgaaatgcaggacttctgtaatgaatttgggtttaagatggcaccaatgcttggtcgcggcacattcgatagcctgattatgattccgaacgatttcgattcggttctcatggcttacaatgcaacggcgaaagaggacctggtaaaagcgaacaactgcgtctttgatgccaatgtgatcggtgataacactgctgaaggctatgttcttaaaccgtgtgaacccaaatggttaccgaatgggacgcgtgtggcgatcaaatgcaagaactccaaattcagcgagaagaagaaaagtgacaaaccgatcaagacacaagtcccactgacggaaattgataagaatctgctggacgtattggcctgttatgtcactttaaaccgcgtgaacaacgtgatctctaagattggaacagtgacgccgaaagattttgagaaagtaatgtggctgactgttcaggatattctggaagaaacgtcacgtgagggtattgttctgacgacatcggacaatcctgacctcgtcaagaaagaacttgtccgcatggtgcaggatgtattagaatcggcatggcgcgaactggtgtcg

SEQ ID NO: 436 - protein, 343 aa, synthetic construct
  REGION 1..343: note = variant of RNA ligase 2 from Escherichia phage RB69 (Bacteriophage RB69)
MHHHHHHGGSGMFKKYSSLENHYNSKFIEKLYANGLTDGVWVAREKIHGTNFSLIIERDNVTCAKRTGPIKPAETFYGYEIVLKKYDKAIKTVQKFMYTAGAVSYQVFGEFAGNGIWKGVDYGEKDFYVFDILINAESGDNTYLTDYEMQDFCNEFGFKMAPMLGRGTFDSLIMIPNDFDSVLMAYNATAKEDLVKANNCVFDANVIGDNTAEGYVLKPCEPKWLPNGTRVAIKCKNSKFSEKKKSDKPIKTQVPLTEIDKNLLDVLACYVTLNRVNNVISKIGTVTPKDFEKVMWLTVQDILEETSREGIVLTTSDNPDLVKKELVRMVQDVLESAWRELVS

SEQ ID NO: 437 - DNA, 1029 bp, synthetic construct
  misc_feature 1..1029: note = variant of RNA ligase 2 from Escherichia phage RB69 (Bacteriophage RB69)
  source 1..1029: mol_type = other DNA
atgcatcaccatcaccatcacggtggcagcggtatgtttaagaaatattctagtctggaaaaccattacaatagcaaattcattgagaaactctatgctaacggcttaactgatggtgtatgggttgcgcgcgaaaagatccacgggacgaacttttcgctgattatcgagcgtgataatgtaacatgcgccaaacgtacaggcccgattaagcctgcagaaaccttctacggttatgaaatcgtcctgaagaaatacgataaagcgattaagacggtgcagaaatttatgtataccgccggcgcggtttcctaccaagtgttcggagaatttgctggcaacggtatctggaaaggggtcgattatggcgagaaagacttctatgtgtttgatattctgatcaatacggaatcaggagacaacacgtacctgactgattatgaaatgcaggacttctgtaatgaatttgggtttaagatggcaccaatgcttggtcgcggcacattcgatagcctgattatgattccgaacgatttcgattcggttctcatggcttacaatgcaacggcgaaagaggacctggtaaaagcgaacaactgcgtctttgatgccaatgtgatcggtgataacactgctgaaggctatgttcttaaaccgtgtgaacccaaatggttaccgaatgggacgcgtgtggcgatcaaatgcaagaactccaaattcagcgagaagaagaaaagtgacaaaccgatcaagacacaagtcccactgacggaaattgataagaatctgctggacgtattggcctgttacgtcactttaaaccgcgtgaacaacgtgatctctaagattggaacagtgacgccgaaagattttgagaaagtaatgggtctgactgttcaggatattctggaagaaacgtcacgtgagggtattgttctgacgacatcggacaatcctgacctcgtcaagaaagaactttggcgcatggtgcaggatgtattagaatcggcatggcgcgaactggtgtcg

SEQ ID NO: 438 - protein, 343 aa, synthetic construct
  REGION 1..343: note = variant of RNA ligase 2 from Escherichia phage RB69 (Bacteriophage RB69)
MHHHHHHGGSGMFKKYSSLENHYNSKFIEKLYANGLTDGVWVAREKIHGTNFSLIIERDNVTCAKRTGPIKPAETFYGYEIVLKKYDKAIKTVQKFMYTAGAVSYQVFGEFAGNGIWKGVDYGEKDFYVFDILINTESGDNTYLTDYEMQDFCNEFGFKMAPMLGRGTFDSLIMIPNDFDSVLMAYNATAKEDLVKANNCVFDANVIGDNTAEGYVLKPCEPKWLPNGTRVAIKCKNSKFSEKKKSDKPIKTQVPLTEIDKNLLDVLACYVTLNRVNNVISKIGTVTPKDFEKVMGLTVQDILEETSREGIVLTTSDNPDLVKKELWRMVQDVLESAWRELVS

SEQ ID NO: 439 - DNA, 1029 bp, synthetic construct
  misc_feature 1..1029: note = variant of RNA ligase 2 from Escherichia phage RB69 (Bacteriophage RB69)
  source 1..1029: mol_type = other DNA
atgcatcaccatcaccatcacggtggcagcggtatgtttaagaaatattctagtctggaaaaccattacaatagcaaattcattgagaaactctatgctaacggcttaactgatggtgtatgggttgcgcgcgaaaagatccacgggacgaacttttcgctgattatcgagcgtgataatgtaacatgcgccaaacgtacaggcccgattaagcctgcagaaaccttctacggttatgaaatcgtcctgaagaaatacgataaagcgattaagacggtgcagaaatttatgtataccgccggcgccgtttcctaccaagtgttcggagaatttgctggcaacggtatcaagaaagaggtcgattatggcgagaaagacttctatgtgtttgatattctgatcaatacggaatcaggagacaacacgtacctgactgattatgaaatgcaggacttctgtaatgaatttgggtttaagatggcaccaatgcttggtcgcggcacattcgatagcctgattatgattccgaacgatttcgattcggttctcatggcttacaatgcaacggcgaaagaggacctggtaaaagcgaacaactgcgtctttgatgccaatgtgatcggtgataacactgctgaaggctatgttcttaaaccgtgtgaacccaaatggttaccgaatgggacgcgtgtggcgatcaaatgcaagaactccaaattcagcgagaagaagaaaagtgacaaaccgatcaagacacaagtcccactgacggaaattgataagaatctgctggacgtattggcctgttatgtcactttaaaccgcgtgaacaacgtgatctctaagattggaacagtgacgccgaaagattttgagaaagtaatgggtctgactgttcaggatattctggaagaaacgtcacgtgagggtattgttctgacgacatcggacaatcctgacctcgtcaagaaagaacttgttcgcatggtgcaggatgtattagaatcggcatggcgcgaactggtgtcg

SEQ ID NO: 440 - protein, 343 aa, synthetic construct
  REGION 1..343: note = variant of RNA ligase 2 from Escherichia phage RB69 (Bacteriophage RB69)
MHHHHHHGGSGMFKKYSSLENHYNSKFIEKLYANGLTDGVWVAREKIHGTNFSLIIERDNVTCAKRTGPIKPAETFYGYEIVLKKYDKAIKTVQKFMYTAGAVSYQVFGEFAGNGIKKEVDYGEKDFYVFDILINTESGDNTYLTDYEMQDFCNEFGFKMAPMLGRGTFDSLIMIPNDFDSVLMAYNATAKEDLVKANNCVFDANVIGDNTAEGYVLKPCEPKWLPNGTRVAIKCKNSKFSEKKKSDKPIKTQVPLTEIDKNLLDVLACYVTLNRVNNVISKIGTVTPKDFEKVMGLTVQDILEETSREGIVLTTSDNPDLVKKELVRMVQDVLESAWRELVS

SEQ ID NO: 441 - DNA, 1029 bp, synthetic construct
  misc_feature 1..1029: note = variant of RNA ligase 2 from Escherichia phage RB69 (Bacteriophage RB69)
  source 1..1029: mol_type = other DNA
atgcatcaccatcaccatcacggtggcagcggtatgtttaagaaatattctagtctggaaaaccattacaatagcaaattcattgagaagctctatgctaacggcttaactgatggtgtatgggttgcgcgcgaaaagatccacgggacgaacttttcgctgattatcgagcgtgataatgtaacatgcgccaaacgtacaggcccgattaagcctgcagaagacttctacggttatgaaatcgtcctgaagaaatacgataaagcgattaagacggtgcagaaatttatgtataccgccggcgcggtttcctaccaagtgttcggagaatttgctggcaacggtatctggaaagaggtcgattatggcgagaaagacttctatgtgtttgatattctgatcaatacggaatcaggagacaacacgtacctgactgattatgaaatgcaggacttctgtaatgaatttgggtttaagatggcaccaatgcttggtcgcggcacattcgatagcctgattatgattccgaacgatttcgattcggttctcatggcttacaatgcaacggcgaaagaggacctggtaaaagcgaacaactgcgtctttgatgccaatgtgatcggtgataacactgctgaaggctatgttcttaaaccgtgtgaacccaaatggttaccgaatgggacgcgtgtggcgatcaaatgcaagaactccaaattcagcgagaagaagaaaagtgacaaaccgatcaagacacaagtcccactgacggaaattgataagaatctgctggacgtattggcctgttatgtcactttaaaccgcgtgaacaacgtgatctctaagattggaacagtgacgccgaaagattttgagaaagtaatggggctgactgttcaggatattctggaagaaacgtcacgtgagggtattgttctgacgacatcggacaatcctgacctcgtcaagaaagaacttgtccgcatggtgcaggatgtattagaatcggcatggcgcgaactggtgtcg

SEQ ID NO: 442 - protein, 343 aa, synthetic construct
  REGION 1..343: note = variant of RNA ligase 2 from Escherichia phage RB69 (Bacteriophage RB69)
MHHHHHHGGSGMFKKYSSLENHYNSKFIEKLYANGLTDGVWVAREKIHGTNFSLIIERDNVTCAKRTGPIKPAEDFYGYEIVLKKYDKAIKTVQKFMYTAGAVSYQVFGEFAGNGIWKEVDYGEKDFYVFDILINTESGDNTYLTDYEMQDFCNEFGFKMAPMLGRGTFDSLIMIPNDFDSVLMAYNATAKEDLVKANNCVFDANVIGDNTAEGYVLKPCEPKWLPNGTRVAIKCKNSKFSEKKKSDKPIKTQVPLTEIDKNLLDVLACYVTLNRVNNVISKIGTVTPKDFEKVMGLTVQDILEETSREGIVLTTSDNPDLVKKELVRMVQDVLESAWRELVS

SEQ ID NO: 443 - DNA, 1029 bp, synthetic construct
  misc_feature 1..1029: note = variant of RNA ligase 2 from Escherichia phage RB69 (Bacteriophage RB69)
  source 1..1029: mol_type = other DNA
atgcatcaccatcaccatcacggtggcagcggtatgtttaagaaatattctagtctggaaaaccattacaatagcaaattcattgagaaactctatgctaacggcttaactgatggtgtatgggttgcgcgcgaaaagatccacgggacgaacttttcgctgattatcgagcgtgataatgtaacatgcgccaaacgtacaggcccgattaagcctgcagaagacttctacggttatgaaatcgtcctgaagaaatacgataaagcgattaagacggtgcagaaatttatgtataccgccggcgcggtttcctaccaagtgttcggagaatttgctggcaacggtatctggaaagaggtcgattatggcgagaaagacttctatgtgtttgatattctgatcaatacggaatcaggagacaacacgtacctgactgattatgaaatgcaggacttctgtaatgaatttgggtttaagatggcaccaatgcttggtcgcggcacattcgatagcctgattatgattccgaacgatttcgattcggttctcatggcttacaatgcaacggcgaaagaggacctggtaaaagcgaacaactgcgtctttgatgccaatgtgatcggtgataacactgctgaaggctatgttcttaaaccgtgtgaacccaaatggttaccgaatgggacgcgtgtggcgatcaaatgcaagaactccaaattcagcgagaagaagaaaagtgacaaaccgatcaagacacaagtcccactgacggaaattgataagaatctgctggacgtattggcctgttatgtcactttaaaccgcgtgaacaacgtgatctctaagattggaacagtgacgccgaaagattttgagaaagtaatgtggctgactgttcaggatattctggaagaaacgtcacgtgagggtattgttctgacgacatcggacaatcctgacctcgtcaagaaagaacttgttcgcatggtgcaggatgtattagaatcggcatggcgcgaactggtgtcg

SEQ ID NO: 444 - protein, 343 aa, synthetic construct
  REGION 1..343: note = variant of RNA ligase 2 from Escherichia phage RB69 (Bacteriophage RB69)
MHHHHHHGGSGMFKKYSSLENHYNSKFIEKLYANGLTDGVWVAREKIHGTNFSLIIERDNVTCAKRTGPIKPAEDFYGYEIVLKKYDKAIKTVQKFMYTAGAVSYQVFGEFAGNGIWKEVDYGEKDFYVFDILINTESGDNTYLTDYEMQDFCNEFGFKMAPMLGRGTFDSLIMIPNDFDSVLMAYNATAKEDLVKANNCVFDANVIGDNTAEGYVLKPCEPKWLPNGTRVAIKCKNSKFSEKKKSDKPIKTQVPLTEIDKNLLDVLACYVTLNRVNNVISKIGTVTPKDFEKVMWLTVQDILEETSREGIVLTTSDNPDLVKKELVRMVQDVLESAWRELVS

SEQ ID NO: 445 - DNA, 1029 bp, synthetic construct
  misc_feature 1..1029: note = variant of RNA ligase 2 from Escherichia phage RB69 (Bacteriophage RB69)
  source 1..1029: mol_type = other DNA
atgcatcaccatcaccatcacggtggcagcggtatgtttacgaaatattctagtctggaaaaccattacaatagcaaattcattgagaaactctatgctaacggcttaactgatggtgtatgggttgcgcgcgaaaagatccacgggacgaacttttcgctgattatcgagcgtgataatgtaacatgcgccaaacgtacaggcccgattaagcctgcagaagacttctacggttatgaaatcgtcctgaagaaatacgataaagcgattaagacggtgcagaaatttatgtataccgccggcaccgtttcctaccaagtgttcggagaatttgctggcaacggtatctggaaagaggtcgattatggcgagaaagacttctatgtgtttgatattctgatcaatacggaatcaggagacaacacgtacctgactgattatgaaatgcaggacttctgtaatgaatttgggtttaagatggcaccaatgcttggtcgcggcacattcgatagcctgattatgattccgaacgatttcgattcggttctcatggcttacaatgcaacggcgaaagaggacctggtaaaagcgaacaactgcgtctttgatgccaatgtgatcggtgataacactgctgaaggctatgttcttaaaccgtgtgaacccaaatggttaccgaatgggacgcgtgtggcgatcaaatgcaagaactccaaattcagcgagaagaagaaaagtgacaaaccgatcaagacacaagtcccactgacggaaattgataagaatctgctggacgtattggcctgttatgtcactttaaaccgcgtgaacaacgtgatctctaagattggaacagtgacgccgaaagattttgagaaagtaatgggtctgactgttcaggatattctggaagaaacgtcacgtgagggtattgttctgacgacatcggacaatcctgacctcgtcaagaaagaacttgtccgcatggtgcaggatgtattagaatcggcatggcgcgaactggtgtcg

SEQ ID NO: 446 - protein, 343 aa, synthetic construct
  REGION 1..343: note = variant of RNA ligase 2 from Escherichia phage RB69 (Bacteriophage RB69)
MHHHHHHGGSGMFTKYSSLENHYNSKFIEKLYANGLTDGVWVAREKIHGTNFSLIIERDNVTCAKRTGPIKPAEDFYGYEIVLKKYDKAIKTVQKFMYTAGTVSYQVFGEFAGNGIWKEVDYGEKDFYVFDILINTESGDNTYLTDYEMQDFCNEFGFKMAPMLGRGTFDSLIMIPNDFDSVLMAYNATAKEDLVKANNCVFDANVIGDNTAEGYVLKPCEPKWLPNGTRVAIKCKNSKFSEKKKSDKPIKTQVPLTEIDKNLLDVLACYVTLNRVNNVISKIGTVTPKDFEKVMGLTVQDILEETSREGIVLTTSDNPDLVKKELVRMVQDVLESAWRELVS

SEQ ID NO: 447 - DNA, 1029 bp, synthetic construct
  misc_feature 1..1029: note = variant of RNA ligase 2 from Escherichia phage RB69 (Bacteriophage RB69)
  source 1..1029: mol_type = other DNA
atgcatcaccatcaccatcacggtggcagcggtatgtttacgaaatattctagtctggaaaaccattacaatagcaaattcattgagaaactctatgctaacggcttaactgatggtgtatgggttgcgcgcgaaaagatccacgggacgaacttttcgctgattatcgagcgtgataatgtaacatgcgccaaacgtacaggcccgattaagcctgcagaagacttctacggttatgaaatcgtcctgaagaaatacgataaagcgattaagacggtgcagaaatttatgtataccgccggcaccgtttcctaccaagtgttcggagaatttgctggcaacggtatctggaaaggggtcgattatggcgagaaagacttctatgtgtttgatattctgatcaatacggaatcaggagacaacacgtacctgactgattatgaaatgcaggacttctgtaatgaatttgggtttaagatggcaccaatgcttggtcgcggcacattcgatagcctgattatgattccgaacgatttcgattcggttctcatggcttacaatgcaacggcgaaagaggacctggtaaaagcgaacaactgcgtctttgatgccaatgtgatcggtgataacactgctgaaggctatgttcttaaaccgtgtgaacccaaatggttaccgaatgggacgcgtgtggcgatcaaatgcaagaactccaaattcagcgagaagaagaaaagtgacaaaccgatcaagacacaagtcccactgacggaaattgataagaatctgctggacgtattggcctgttatgtcactttaaaccgcgtgaacaacgtgatctctaagattggaacagtgacgccgaaagattttgagaaagtaatgtggctgactgttcaggatattctggaagaaacgtcacgtgagggtattgttctgacgacatcggacaatcctgacctcgtcaagaaagaacttgtccgcatggtgcaggatgtattagaatcggcatggcgcgaactggtgtcg

SEQ ID NO: 448 - protein, 343 aa, synthetic construct
  REGION 1..343: note = variant of RNA ligase 2 from Escherichia phage RB69 (Bacteriophage RB69)
MHHHHHHGGSGMFTKYSSLENHYNSKFIEKLYANGLTDGVWVAREKIHGTNFSLIIERDNVTCAKRTGPIKPAEDFYGYEIVLKKYDKAIKTVQKFMYTAGTVSYQVFGEFAGNGIWKGVDYGEKDFYVFDILINTESGDNTYLTDYEMQDFCNEFGFKMAPMLGRGTFDSLIMIPNDFDSVLMAYNATAKEDLVKANNCVFDANVIGDNTAEGYVLKPCEPKWLPNGTRVAIKCKNSKFSEKKKSDKPIKTQVPLTEIDKNLLDVLACYVTLNRVNNVISKIGTVTPKDFEKVMWLTVQDILEETSREGIVLTTSDNPDLVKKELVRMVQDVLESAWRELVS

SEQ ID NO: 449 - DNA, 1029 bp, synthetic construct
  misc_feature 1..1029: note = variant of RNA ligase 2 from Escherichia phage RB69 (Bacteriophage RB69)
  source 1..1029: mol_type = other DNA
atgcatcaccatcaccatcacggtggcagcggtatgtttacgaaatattctagtctggaaaaccattacaatagcaaattcattgagaagctctatgctaacggcttaactgatggtgtatgggttgcgcgcgaaaagatccacgggacgaacttttcgctgattatcgagcgtgataatgtaacatgcgccaaacgtacaggcccgattaagcctgcagaaaccttctacggttatgaaatcgtcctgaagaaatacgataaagcgattaagacggtgcagaaatttatgtataccgccggcgcggtttcctaccaagtgttcggagaatttgctggcaacggtatctggaaaggtgtcgattatggcgagaaagacttctatgtgtttgatattctgatcaatacggaatcaggagacaacacgtacctgactgattatgaaatgcaggacttctgtaatgaatttgggtttaagatggcaccaatgcttggtcgcggcacattcgatagcctgattatgattccgaacgatttcgattcggttctcatggcttacaatgcaacggcgaaagaggacctggtaaaagcgaacaactgcgtctttgatgccaatgtgatcggtgataacactgctgaaggctatgttcttaaaccgtgtgaacccaaatggttaccgaatgggacgcgtgtggcgatcaaatgcaagaactccaaattcagcgagaagaagaaaagtgacaaaccgatcaagacacaagtcccactgacggaaattgataagaatctgctggacgtattggcctgttacgtcactttaaaccgcgtgaacaacgtgatctctaagattggaacagtgacgccgaaagattttgagaaagtaatgggtctgactgttcaggatattctggaagaaacgtcacgtgagggtattgttctgacgacatcggacaatcctgacctcgtcaagaaagaacttgtccgcatggtgcaggatgtattagaatcggcatggcgcgaactggtgtcg

SEQ ID NO: 450 - protein, 343 aa, synthetic construct
  REGION 1..343: note = variant of RNA ligase 2 from Escherichia phage RB69 (Bacteriophage RB69)
MHHHHHHGGSGMFTKYSSLENHYNSKFIEKLYANGLTDGVWVAREKIHGTNFSLIIERDNVTCAKRTGPIKPAETFYGYEIVLKKYDKAIKTVQKFMYTAGAVSYQVFGEFAGNGIWKGVDYGEKDFYVFDILINTESGDNTYLTDYEMQDFCNEFGFKMAPMLGRGTFDSLIMIPNDFDSVLMAYNATAKEDLVKANNCVFDANVIGDNTAEGYVLKPCEPKWLPNGTRVAIKCKNSKFSEKKKSDKPIKTQVPLTEIDKNLLDVLACYVTLNRVNNVISKIGTVTPKDFEKVMGLTVQDILEETSREGIVLTTSDNPDLVKKELVRMVQDVLESAWRELVS

SEQ ID NO: 451 - DNA, 1029 bp, synthetic construct
  misc_feature 1..1029: note = variant of RNA ligase 2 from Escherichia phage RB69 (Bacteriophage RB69)
  source 1..1029: mol_type = other DNA
atgcatcaccatcaccatcacggtggcagcggtatgtttacgaaatattctagtctggaaaaccattacaatagcaaattcattgagaaactctatgctaacggcttaactgatggtgtatgggttgcgcgcgaaaagatccacgggacgaacttttcgctgattatcgagcgtgataatgtaacatgcgccaaacgtacaggcccgattaagcctgcagaaaccttctacggttatgaaatcgtcctgaagaaatacgataaagcgattaagacggtgcagaaatttatgtataccgccggcgcggtttcctaccaagtgttcggagaatttgctggcaacggtatctggaaagaggtcgattatggcgagaaagacttctatgtgtttgatattctgatcaatacggaatcaggagacaacacgtacctgactgattatgaaatgcaggacttctgtaatgaatttgggtttaagatggcaccaatgcttggtcgcggcacattcgatagcctgattatgattccgaacgatttcgattcggttctcatggcttacaatgcaacggcgaaagaggacctggtaaaagcgaacaactgcgtctttgatgccaatgtgatcggtgataacactgctgaaggctatgttcttaaaccgtgtgaacccaaatggttaccgaatgggacgcgtgtggcgatcaaatgcaagaactccaaattcagcgagaagaagaaaagtgacaaaccgatcaagacacaagtcccactgacggaaattgataagaatctgctggacgtattggcctgttacgtcactttaaaccgcgtgaacaacgtgatctctaagattggaacagtgacgccgaaagattttgagaaagtaatgggtctgactgttcaggatattctggaagaaacgtcacgtgagggtattgttctgacgacatcggacaatcctgacctcgtcaagaaagaacttgttcgcatggtgcaggatgtattagaatcggcatggcgcgaactggtgtcg

SEQ ID NO: 452 - protein, 343 aa, synthetic construct
  REGION 1..343: note = variant of RNA ligase 2 from Escherichia phage RB69 (Bacteriophage RB69)
MHHHHHHGGSGMFTKYSSLENHYNSKFIEKLYANGLTDGVWVAREKIHGTNFSLIIERDNVTCAKRTGPIKPAETFYGYEIVLKKYDKAIKTVQKFMYTAGAVSYQVFGEFAGNGIWKEVDYGEKDFYVFDILINTESGDNTYLTDYEMQDFCNEFGFKMAPMLGRGTFDSLIMIPNDFDSVLMAYNATAKEDLVKANNCVFDANVIGDNTAEGYVLKPCEPKWLPNGTRVAIKCKNSKFSEKKKSDKPIKTQVPLTEIDKNLLDVLACYVTLNRVNNVISKIGTVTPKDFEKVMGLTVQDILEETSREGIVLTTSDNPDLVKKELVRMVQDVLESAWRELVS

SEQ ID NO: 453 - DNA, 1029 bp, synthetic construct
  misc_feature 1..1029: note = variant of RNA ligase 2 from Escherichia phage RB69 (Bacteriophage RB69)
  source 1..1029: mol_type = other DNA
atgcatcaccatcaccatcacggtggcagcggtatgtttacgaaatattctagtctggaaaaccattacaatagcaaattcattgagaaactctatgctaacggcttaactgatggtgtatgggttgcgcgcgaaaagatccacgggacgaacttttcgctgattatcgagcgtgataatgtaacatgcgccaaacgtacaggcccgattaagcctgcagaaaccttctacggttatgaaatcgtcctgaagaaatacgataaagcgattaagacggtgcagaaatttatgtataccgccggcgccgtttcctaccaagtgttcggagaatttgctggcaacggtatctggaaagaggtcgattatggcgagaaagacttctatgtgtttgatattctgatcaatacggaatcaggagacaacacgtacctgactgattatgaaatgcaggacttctgtaatgaatttgggtttaagatggcaccaatgcttggtcgcggcacattcgatagcctgattatgattccgaacgatttcgattcggttctcatggcttacaatgcaacggcgaaagaggacctggtaaaagcgaacaactgcgtctttgatgccaatgtgatcggtgataacactgctgaaggctatgttcttaaaccgtgtgaacccaaatggttaccgaatgggacgcgtgtggcgatcaaatgcaagaactccaaattcagcgagaagaagaaaagtgacaaaccgatcaagacacaagtcccactgacggaaattgataagaatctgctggacgtattggcctgttatgtcactttaaaccgcgtgaacaacgtgatctctaagattggaacagtgacgccgaaagattttgagaaagtaatggggctgactgttcaggatattctggaagaaacgtcacgtgagggtattgttctgacgacatcggacaatcctgacctcgtcaagaaagaactttggcgcatggtgcaggatgtattagaatcggcatggcgcgaactggtgtcg

SEQ ID NO: 454 - protein, 343 aa, synthetic construct
  REGION 1..343: note = variant of RNA ligase 2 from Escherichia phage RB69 (Bacteriophage RB69)
MHHHHHHGGSGMFTKYSSLENHYNSKFIEKLYANGLTDGVWVAREKIHGTNFSLIIERDNVTCAKRTGPIKPAETFYGYEIVLKKYDKAIKTVQKFMYTAGAVSYQVFGEFAGNGIWKEVDYGEKDFYVFDILINTESGDNTYLTDYEMQDFCNEFGFKMAPMLGRGTFDSLIMIPNDFDSVLMAYNATAKEDLVKANNCVFDANVIGDNTAEGYVLKPCEPKWLPNGTRVAIKCKNSKFSEKKKSDKPIKTQVPLTEIDKNLLDVLACYVTLNRVNNVISKIGTVTPKDFEKVMGLTVQDILEETSREGIVLTTSDNPDLVKKELWRMVQDVLESAWRELVS

SEQ ID NO: 455 - DNA, 1029 bp, synthetic construct
  misc_feature 1..1029: note = variant of RNA ligase 2 from Escherichia phage RB69 (Bacteriophage RB69)
  source 1..1029: mol_type = other DNA
atgcatcaccatcaccatcacggtggcagcggtatgtttacgaaatattctagtctggaaaaccattacaatagcaaattcattgagaaactctatgctaacggcttaactgatggtgtatgggttgcgcgcgaaaagatccacgggacgaacttttcgctgattatcgagcgtgataatgtaacatgcgccaaacgtacaggcccgattaagcctgcagaaaccttctacggttatgaaatcgtcctgaagaaatacgataaagcgattaagacggtgcagaaatttatgtataccgccggcgcggtttcctaccaagtgttcggagaatttgctggcaacggtatcatgaaagaggtcgattatggcgagaaagacttctatgtgtttgatattctgatcaatacggaatcaggagacaacacgtacctgactgattatgaaatgcaggacttctgtaatgaatttgggtttaagatggcaccaatgcttggtcgcggcacattcgatagcctgattatgattccgaacgatttcgattcggttctcatggcttacaatgcaacggcgaaagaggacctggtaaaagcgaacaactgcgtctttgatgccaatgtgatcggtgataacactgctgaaggctatgttcttaaaccgtgtgaacccaaatggttaccgaatgggacgcgtgtggcgatcaaatgcaagaactccaaattcagcgagaagaagaaaagtgacaaaccgatcaagacacaagtcccactgacggaaattgataagaatctgctggacgtattggcctgttacgtcactttaaaccgcgtgaacaacgtgatctctaagattggaacagtgacgccgaaagattttgagaaagtaatggggctgactgttcaggatattctggaagaaacgtcacgtgagggtattgttctgacgacatcggacaatcctgacctcgtcaagaaagaacttgtccgcatggtgcaggatgtattagaatcggcatggcgcgaactggtgtcg

SEQ ID NO: 456 - protein, 343 aa, synthetic construct
  REGION 1..343: note = variant of RNA ligase 2 from Escherichia phage RB69 (Bacteriophage RB69)
MHHHHHHGGSGMFTKYSSLENHYNSKFIEKLYANGLTDGVWVAREKIHGTNFSLIIERDNVTCAKRTGPIKPAETFYGYEIVLKKYDKAIKTVQKFMYTAGAVSYQVFGEFAGNGIMKEVDYGEKDFYVFDILINTESGDNTYLTDYEMQDFCNEFGFKMAPMLGRGTFDSLIMIPNDFDSVLMAYNATAKEDLVKANNCVFDANVIGDNTAEGYVLKPCEPKWLPNGTRVAIKCKNSKFSEKKKSDKPIKTQVPLTEIDKNLLDVLACYVTLNRVNNVISKIGTVTPKDFEKVMGLTVQDILEETSREGIVLTTSDNPDLVKKELVRMVQDVLESAWRELVS

SEQ ID NO: 457 - DNA, 1029 bp, synthetic construct
  misc_feature 1..1029: note = variant of RNA ligase 2 from Escherichia phage RB69 (Bacteriophage RB69)
  source 1..1029: mol_type = other DNA
atgcatcaccatcaccatcacggtggcagcggtatgtttacgaaatattctagtctggaaaaccattacaatagcaaattcattgagaaactctatgctaacggcttaactgatggtgtatgggttgcgcgcgaaaagatccacgggacgaacttttcgctgattatcgagcgtgataatgtaacatgcgccaaacgtacaggcccgattaagcctgcagaaaccttctacggttatgaaatcgtcctgaagaaatacgataaagcgattaagacggtgcagaaatttatgtataccgccggcgccgtttcctaccaagtgttcggagaatttgctggcaacggtatcatgaaagaggtcgattatggcgagaaagacttctatgtgtttgatattctgatcaatacggaatcaggagacaacacgtacctgactgattatgaaatgcaggacttctgtaatgaatttgggtttaagatggcaccaatgcttggtcgcggcacattcgatagcctgattatgattccgaacgatttcgattcggttctcatggcttacaatgcaacggcgaaagaggacctggtaaaagcgaacaactgcgtctttgatgccaatgtgatcggtgataacactgctgaaggctatgttcttaaaccgtgtgaacccaaatggttaccgaatgggacgcgtgtggcgatcaaatgcaagaactccaaattcagcgagaagaagaaaagtgacaaaccgatcaagacacaagtcccactgacggaaattgataagaatctgctggacgtattggcctgttatgtcactttaaaccgcgtgaacaacgtgatctctaagattggaacagtgacgccgaaagattttgagaaagtaatgtggctgactgttcaggatattctggaagaaacgtcacgtgagggtattgttctgacgacatcggacaatcctgacctcgtcaagaaagaacttgttcgcatggtgcaggatgtattagaatcggcatggcgcgaactggtgtcg

SEQ ID NO: 458 - protein, 343 aa, synthetic construct
  REGION 1..343: note = variant of RNA ligase 2 from Escherichia phage RB69 (Bacteriophage RB69)
MHHHHHHGGSGMFTKYSSLENHYNSKFIEKLYANGLTDGVWVAREKIHGTNFSLIIERDNVTCAKRTGPIKPAETFYGYEIVLKKYDKAIKTVQKFMYTAGAVSYQVFGEFAGNGIMKEVDYGEKDFYVFDILINTESGDNTYLTDYEMQDFCNEFGFKMAPMLGRGTFDSLIMIPNDFDSVLMAYNATAKEDLVKANNCVFDANVIGDNTAEGYVLKPCEPKWLPNGTRVAIKCKNSKFSEKKKSDKPIKTQVPLTEIDKNLLDVLACYVTLNRVNNVISKIGTVTPKDFEKVMWLTVQDILEETSREGIVLTTSDNPDLVKKELVRMVQDVLESAWRELVS

SEQ ID NO: 459 - DNA, 1029 bp, synthetic construct
  misc_feature 1..1029: note = variant of RNA ligase 2 from Escherichia phage RB69 (Bacteriophage RB69)
  source 1..1029: mol_type = other DNA
atgcatcaccatcaccatcacggtggcagcggtatgtttacgaaatattctagtctggaaaaccattacaatagcaaattcattgagaaactctatgctaacggcttaactgatggtgtatgggttgcgcgcgaaaagatccacgggacgaacttttcgctgattatcgagcgtgataatgtaacatgcgccaaacgtacaggcccgattaagcctgcagaagacttctacggttatgaaatcgtcctgaagaaatacgataaagcgattaagacggtgcagaaatttatgtataccgccggcgcggtttcctaccaagtgttcggagaatttgctggcaacggtatctggaaagaggtcgattatggcgagaaagacttctatgtgtttgatattctgatcaatacggaatcaggagacaacacgtacctgactgattatgaaatgcaggacttctgtaatgaatttgggtttaagatggcaccaatgcttggtcgcggcacattcgatagcctgattatgattccgaacgatttcgattcggttctcatggcttacaatgcaacggcgaaagaggacctggtaaaagcgaacaactgcgtctttgatgccaatgtgatcggtgataacactgctgaaggctatgttcttaaaccgtgtgaacccaaatggttaccgaatgggacgcgtgtggcgatcaaatgcaagaactccaaattcagcgagaagaagaaaagtgacaaaccgatcaagacacaagtcccactgacggaaattgataagaatctgctggacgtattggcctgttacgtcactttaaaccgcgtgaacaacgtgatctctaagattggaacagtgacgccgaaagattttgagaaagtaatggggctgactgttcaggatattctggaagaaacgtcacgtgagggtattgttctgacgacatcggacaatcctgacctcgtcaagaaagaacttgttcgcatggtgcaggatgtattagaatcggcatggcgcgaactggtgtcg

SEQ ID NO: 460 - protein, 343 aa, synthetic construct
  REGION 1..343: note = variant of RNA ligase 2 from Escherichia phage RB69 (Bacteriophage RB69)
MHHHHHHGGSGMFTKYSSLENHYNSKFIEKLYANGLTDGVWVAREKIHGTNFSLIIERDNVTCAKRTGPIKPAEDFYGYEIVLKKYDKAIKTVQKFMYTAGAVSYQVFGEFAGNGIWKEVDYGEKDFYVFDILINTESGDNTYLTDYEMQDFCNEFGFKMAPMLGRGTFDSLIMIPNDFDSVLMAYNATAKEDLVKANNCVFDANVIGDNTAEGYVLKPCEPKWLPNGTRVAIKCKNSKFSEKKKSDKPIKTQVPLTEIDKNLLDVLACYVTLNRVNNVISKIGTVTPKDFEKVMGLTVQDILEETSREGIVLTTSDNPDLVKKELVRMVQDVLESAWRELVS

SEQ ID NO: 461 - DNA, 1029 bp, synthetic construct
  misc_feature 1..1029: note = variant of RNA ligase 2 from Escherichia phage RB69 (Bacteriophage RB69)
  source 1..1029: mol_type = other DNA
atgcatcaccatcaccatcacggtggcagcggtatgtttacgaaatattctagtctggaaaaccattacaatagcaaattcattgagaaactctatgctaacggcttaactgatggtgtatgggttgcgcgcgaaaagatccacgggacgaacttttcgctgattatcgagcgtgataatgtaacatgcgccaaacgtacaggcccgattaagcctgcagaagacttctacggttatgaaatcgtcctgaagaaatacgataaagcgattaagacggtgcagaaatttatgtataccgccggcgcggtttcctaccaagtgttcggagaatttgctggcaacggtatctggaaaggggtcgattatggcgagaaagacttctatgtgtttgatattctgatcaatacggaatcaggagacaacacgtacctgactgattatgaaatgcaggacttctgtaatgaatttgggtttaagatggcaccaatgcttggtcgcggcacattcgatagcctgattatgattccgaacgatttcgattcggttctcatggcttacaatgcaacggcgaaagaggacctggtaaaagcgaacaactgcgtctttgatgccaatgtgatcggtgataacactgctgaaggctatgttcttaaaccgtgtgaacccaaatggttaccgaatgggacgcgtgtggcgatcaaatgcaagaactccaaattcagcgagaagaagaaaagtgacaaaccgatcaagacacaagtcccactgacggaaattgataagaatctgctggacgtattggcctgttacgtcactttaaaccgcgtgaacaacgtgatctctaagattggaacagtgacgccgaaagattttgagaaagtaatgtggctgactgttcaggatattctggaagaaacgtcacgtgagggtattgttctgacgacatcggacaatcctgacctcgtcaagaaagaacttgttcgcatggtgcaggatgtattagaatcggcatggcgcgaactggtgtcg

SEQ ID NO: 462 - protein, 343 aa, synthetic construct
  REGION 1..343: note = variant of RNA ligase 2 from Escherichia phage RB69 (Bacteriophage RB69)
MHHHHHHGGSGMFTKYSSLENHYNSKFIEKLYANGLTDGVWVAREKIHGTNFSLIIERDNVTCAKRTGPIKPAEDFYGYEIVLKKYDKAIKTVQKFMYTAGAVSYQVFGEFAGNGIWKGVDYGEKDFYVFDILINTESGDNTYLTDYEMQDFCNEFGFKMAPMLGRGTFDSLIMIPNDFDSVLMAYNATAKEDLVKANNCVFDANVIGDNTAEGYVLKPCEPKWLPNGTRVAIKCKNSKFSEKKKSDKPIKTQVPLTEIDKNLLDVLACYVTLNRVNNVISKIGTVTPKDFEKVMWLTVQDILEETSREGIVLTTSDNPDLVKKELVRMVQDVLESAWRELVS

SEQ ID NO: 463 - DNA, 1029 bp, synthetic construct
  misc_feature 1..1029: note = variant of RNA ligase 2 from Escherichia phage RB69 (Bacteriophage RB69)
  source 1..1029: mol_type = other DNA
atgcatcaccatcaccatcacggtggcagcggtatgtttacgaaatattctagtctggaaaaccattacaatagtaaattcattgagcatctctatgctaacggcttaactgatggtgtatgggttgcgcgcgaaaagatccacgggacgaacttttcgctgattatcgagcgtgataatgtaacatgcgccaaacgtacaggcccgattaagcctgcagaagacttctacggttatgaaatcgtcctgaagaaatacgataaagcgattaagacggtgcagaaatttatgtataccgccggcgcggtttcctaccaagtgttcggagaatttgctggcaacggtatctggaaaggggtcgattatggcgagaaagacttctatgtgtttgatattctgatcaatacggaatcaggagacaacacgtacctgactgattatgaaatgcaggacttctgtaatgaatttgggtttaagatggcaccaatgcttggtcgcggcacattcgatagcctgattatgattccgaacgatttcgattcggttctcatggcttacaatgcaacggcgaaagaggacctggtaaaagcgaacaactgcgtctttgatgccaatgtgatcggtgataacactgctgaaggctatgttcttaaaccgtgtgaacccaaatggttaccgaatgggacgcgtgtggcgatcaaatgcaagaactccaaattcagcgagaagaagaaaagtgacaaaccgatcaagacacaagtcccactgacggaaattgataagaatctgctggacgtattggcctgtgctgtcactttaaaccgcgtgaacaacgtgatctctaagattggaacagtgacgccgaaagattttgagaaagtaatgggtctgactgttcaggatattctggaagaaacgtcacgtgagggtattgttctgacgacatcggacaatcctgacctcgtcaagaaagaacttgtccgcatggtgcaggatgtattagaatcggcatggcgcgaactggtgtcg

SEQ ID NO: 464 - protein, 343 aa, synthetic construct
  REGION 1..343: note = variant of RNA ligase 2 from Escherichia phage RB69 (Bacteriophage RB69)
MHHHHHHGGSGMFTKYSSLENHYNSKFIEHLYANGLTDGVWVAREKIHGTNFSLIIERDNVTCAKRTGPIKPAEDFYGYEIVLKKYDKAIKTVQKFMYTAGAVSYQVFGEFAGNGIWKGVDYGEKDFYVFDILINTESGDNTYLTDYEMQDFCNEFGFKMAPMLGRGTFDSLIMIPNDFDSVLMAYNATAKEDLVKANNCVFDANVIGDNTAEGYVLKPCEPKWLPNGTRVAIKCKNSKFSEKKKSDKPIKTQVPLTEIDKNLLDVLACAVTLNRVNNVISKIGTVTPKDFEKVMGLTVQDILEETSREGIVLTTSDNPDLVKKELVRMVQDVLESAWRELVS

SEQ ID NO: 465 - DNA, 1029 bp, synthetic construct
  misc_feature 1..1029: note = variant of RNA ligase 2 from Escherichia phage RB69 (Bacteriophage RB69)
  source 1..1029: mol_type = other DNA
atgcatcaccatcaccatcacggtggcagcggtatgtttacgaaatattctagtctggaaaaccattacaatggtaaattcattgagaagctctatgctaacggcttaactgatggtgtatgggttgcgcgcgaaaagatccacgggacgaacttttcgctgattatcgagcgtgataatgtaacatgcgccaaacgtacaggcccgattaagcctgcagaagacttctacggttatgaaatcgtcctgaagaaatacgataaagcgattaagacggtgcagaaatttatgtataccgccggcgccgtttcctaccaagtgttcggagaatttgctggcaacggtatctggaaaggtgtcgattatggcgagaaagacttctatgtgtttgatattctgatcaatacggaatcaggagacaacacgtacctgactgattatgaaatgcaggacttctgtaatgaatttgggtttaagatggcaccaatgcttggtcgcggcacattcgatagcctgattatgattccgaacgatttcgattcggttctcatggcttacaatgcaacggcgaaagaggacctggtaaaagcgaacaactgcgtctttgatgccaatgtgatcggtgataacactgctgaaggctatgttcttaaaccgtgtgaacccaaatggttaccgaatgggacgcgtgtggcgatcaaatgcaagaactccaaattcagcgagaagaagaaaagtgacaaaccgatcaagacacaagtcccactgacggaaattgataagaatctgctggacgtattggcctgttatgtcactttaaaccgcgtgaacaacgtgatctctaagattggaacagtgacgccgaaagattttgagaaagtaatgggtctgactgttcaggatattctggaagaaacgtcacgtgagggtattgttctgacgacatcggacaatcctgacctcgtcaagaaagaacttgtccgcatggtgcaggatgtattagaatcggcatggcgcgaactggtgtcg

SEQ ID NO: 466 - protein, 343 aa, synthetic construct
  REGION 1..343: note = variant of RNA ligase 2 from Escherichia phage RB69 (Bacteriophage RB69)
MHHHHHHGGSGMFTKYSSLENHYNGKFIEKLYANGLTDGVWVAREKIHGTNFSLIIERDNVTCAKRTGPIKPAEDFYGYEIVLKKYDKAIKTVQKFMYTAGAVSYQVFGEFAGNGIWKGVDYGEKDFYVFDILINTESGDNTYLTDYEMQDFCNEFGFKMAPMLGRGTFDSLIMIPNDFDSVLMAYNATAKEDLVKANNCVFDANVIGDNTAEGYVLKPCEPKWLPNGTRVAIKCKNSKFSEKKKSDKPIKTQVPLTEIDKNLLDVLACYVTLNRVNNVISKIGTVTPKDFEKVMGLTVQDILEETSREGIVLTTSDNPDLVKKELVRMVQDVLESAWRELVS

SEQ ID NO: 467 - DNA, 1029 bp, synthetic construct
  misc_feature 1..1029: note = variant of RNA ligase 2 from Escherichia phage RB69 (Bacteriophage RB69)
  source 1..1029: mol_type = other DNA
atgcatcaccatcaccatcacggtggcagcggtatgtttacgaaatattctagtctggaaaaccattacaatagcaaattcattgagaaactctatgctaacggcttaactgatggtgtatgggttgcgcgcgaaaagatccacgggacgaacttttcgctgattatcgagcgtgataatgtaacatgcgccaaacgtacaggcccgattaagcctgcagaagacttctacggttatgaaatcgtcctgaagaaatacgataaagcgattaagacggtgcagaaatttatgtataccgccggcgcggtttcctaccaagtgttcggagaatttgctggcaacggtatcaagaaaggggtcgattatggcgagaaagacttctatgtgtttgatattctgatcaatacggaatcaggagacaacacgtacctgactgattatgaaatgcaggacttctgtaatgaatttgggtttaagatggcaccaatgcttggtcgcggcacattcgatagcctgattatgattccgaacgatttcgattcggttctcatggcttacaatgcaacggcgaaagaggacctggtaaaagcgaacaactgcgtctttgatgccaatgtgatcggtgataacactgctgaaggctatgttcttaaaccgtgtgaacccaaatggttaccgaatgggacgcgtgtggcgatcaaatgcaagaactccaaattcagcgagaagaagaaaagtgacaaaccgatcaagacacaagtcccactgacggaaattgataagaatctgctggacgtattggcctgttatgtcactttaaaccgcgtgaacaacgtgatctctaagattggaacagtgacgccgaaagattttgagaaagtaatgggtctgactgttcaggatattctggaagaaacgtcacgtgagggtattgttctgacgacatcggacaatcctgacctcgtcaagaaagaacttgtccgcatggtgcaggatgtattagaatcggcatggcgcgaactggtgtcg

SEQ ID NO: 468 - protein, 343 aa, synthetic construct
  REGION 1..343: note = variant of RNA ligase 2 from Escherichia phage RB69 (Bacteriophage RB69)
MHHHHHHGGSGMFTKYSSLENHYNSKFIEKLYANGLTDGVWVAREKIHGTNFSLIIERDNVTCAKRTGPIKPAEDFYGYEIVLKKYDKAIKTVQKFMYTAGAVSYQVFGEFAGNGIKKGVDYGEKDFYVFDILINTESGDNTYLTDYEMQDFCNEFGFKMAPMLGRGTFDSLIMIPNDFDSVLMAYNATAKEDLVKANNCVFDANVIGDNTAEGYVLKPCEPKWLPNGTRVAIKCKNSKFSEKKKSDKPIKTQVPLTEIDKNLLDVLACYVTLNRVNNVISKIGTVTPKDFEKVMGLTVQDILEETSREGIVLTTSDNPDLVKKELVRMVQDVLESAWRELVS

SEQ ID NO: 469 - DNA, 1029 bp, synthetic construct
  misc_feature 1..1029: note = variant of RNA ligase 2 from Escherichia phage RB69 (Bacteriophage RB69)
  source 1..1029: mol_type = other DNA
atgcatcaccatcaccatcacggtggcagcggtatgtttacgaaatattctagtctggaaaaccattacaatagcaaattcattgagaaactctatgctaacggcttaactgatggtgtatgggttgcgcgcgaaaagatccacgggacgaacttttcgctgattatcgagcgtgataatgtaacatgcgccaaacgtacaggcccgattaagcctgcagaagacttctacggttatgaaatcgtcctgaagaaatacgataaagcgattaagacggtgcagaaatttatgtataccgccggcgcggtttcctaccaagtgttcggagaatttgctggcaacggtatcaagaaagaggtcgattatggcgagaaagacttctatgtgtttgatattctgatcaatacggaatcaggagacaacacgtacctgactgattatgaaatgcaggacttctgtaatgaatttgggtttaagatggcaccaatgcttggtcgcggcacattcgatagcctgattatgattccgaacgatttcgattcggttctcatggcttacaatgcaacggcgaaagaggacctggtaaaagcgaacaactgcgtctttgatgccaatgtgatcggtgataacactgctgaaggctatgttcttaaaccgtgtgaacccaaatggttaccgaatgggacgcgtgtggcgatcaaatgcaagaactccaaattcagcgagaagaagaaaagtgacaaaccgatcaagacacaagtcccactgacggaaattgataagaatctgctggacgtattggcctgttatgtcactttaaaccgcgtgaacaacgtgatctctaagattggaacagtgacgccgaaagattttgagaaagtaatgggtctgactgttcaggatattctggaagaaacgtcacgtgagggtattgttctgacgacatcggacaatcctgacctcgtcaagaaagaacttgttcgcatggtgcaggatgtattagaatcggcatggcgcgaactggtgtcg

SEQ ID NO: 470 - protein, 343 aa, synthetic construct
  REGION 1..343: note = variant of RNA ligase 2 from Escherichia phage RB69 (Bacteriophage RB69)
MHHHHHHGGSGMFTKYSSLENHYNSKFIEKLYANGLTDGVWVAREKIHGTNFSLIIERDNVTCAKRTGPIKPAEDFYGYEIVLKKYDKAIKTVQKFMYTAGAVSYQVFGEFAGNGIKKEVDYGEKDFYVFDILINTESGDNTYLTDYEMQDFCNEFGFKMAPMLGRGTFDSLIMIPNDFDSVLMAYNATAKEDLVKANNCVFDANVIGDNTAEGYVLKPCEPKWLPNGTRVAIKCKNSKFSEKKKSDKPIKTQVPLTEIDKNLLDVLACYVTLNRVNNVISKIGTVTPKDFEKVMGLTVQDILEETSREGIVLTTSDNPDLVKKELVRMVQDVLESAWRELVS

SEQ ID NO: 471 - DNA, 1029 bp, synthetic construct
  misc_feature 1..1029: note = variant of RNA ligase 2 from Escherichia phage RB69 (Bacteriophage RB69)
  source 1..1029: mol_type = other DNA
atgcatcaccatcaccatcacggtggcagcggtatgtttacgaaatattctagtctggaaaaccattacaatagcaaattcattgagaaactctatgctaacggcttaactgatggtgtatgggttgcgcgcgaaaagatccacgggacgaacttttcgctgattatcgagcgtgataatgtaacatgcgccaaacgtacaggcccgattaagcctgcagaagacttctacggttatgaaatcgtcctgaagaaatacgataaagcgattaagacggtgcagaaatttatgtataccgccggcgcggtttcctaccaagtgttcggagaatttgctggcaacggtatcatgaaagaggtcgattatggcgagaaagacttctatgtgtttgatattctgatcaatacggaatcaggagacaacacgtacctgactgattatgaaatgcaggacttctgtaatgaatttgggtttaagatggcaccaatgcttggtcgcggcacattcgatagcctgattatgattccgaacgatttcgattcggttctcatggcttacaatgcaacggcgaaagaggacctggtaaaagcgaacaactgcgtctttgatgccaatgtgatcggtgataacactgctgaaggctatgttcttaaaccgtgtgaacccaaatggttaccgaatgggacgcgtgtggcgatcaaatgcaagaactccaaattcagcgagaagaagaaaagtgacaaaccgatcaagacacaagtcccactgacggaaattgataagaatctgctggacgtattggcctgttatgtcactttaaaccgcgtgaacaacgtgatctctaagattggaacagtgacgccgaaagattttgagaaagtaatgggtctgactgttcaggatattctggaagaaacgtcacgtgagggtattgttctgacgacatcggacaatcctgacctcgtcaagaaagaacttgttcgcatggtgcaggatgtattagaatcggcatggcgcgaactggtgtcg

SEQ ID NO: 472 - protein, 343 aa, synthetic construct
  REGION 1..343: note = variant of RNA ligase 2 from Escherichia phage RB69 (Bacteriophage RB69)
MHHHHHHGGSGMFTKYSSLENHYNSKFIEKLYANGLTDGVWVAREKIHGTNFSLIIERDNVTCAKRTGPIKPAEDFYGYEIVLKKYDKAIKTVQKFMYTAGAVSYQVFGEFAGNGIMKEVDYGEKDFYVFDILINTESGDNTYLTDYEMQDFCNEFGFKMAPMLGRGTFDSLIMIPNDFDSVLMAYNATAKEDLVKANNCVFDANVIGDNTAEGYVLKPCEPKWLPNGTRVAIKCKNSKFSEKKKSDKPIKTQVPLTEIDKNLLDVLACYVTLNRVNNVISKIGTVTPKDFEKVMGLTVQDILEETSREGIVLTTSDNPDLVKKELVRMVQDVLESAWRELVS

SEQ ID NO: 473 - DNA, 1029 bp, synthetic construct
  misc_feature 1..1029: note = variant of RNA ligase 2 from Escherichia phage RB69 (Bacteriophage RB69)
  source 1..1029: mol_type = other DNA
atgcatcaccatcaccatcacggtggcagcggtatgtttacgaaatattctagtctggaaaaccattacaatagcaaattcattgagaaactctatgctaacggcttaactgatggtgtatgggttgcgcgcgaaaagatccacgggacgaacttttcgctgattatcgagcgtgataatgtaacatgcgccaaacgtacaggcccgattaagcctgcagaagacttctacggttatgaaatcgtcctgaagaaatacgataaagcgattaagacggtgcagaaatttatgtataccgccggcgcggtttcctaccaagtgttcggagaatttgctggcaacggtatcatgaaagaggtcgattatggcgagaaagacttctatgtgtttgatattctgatcaatacggaatcaggagacaacacgtacctgactgattatgaaatgcaggacttctgtaatgaatttgggtttaagatggcaccaatgcttggtcgcggcacattcgatagcctgattatgattccgaacgatttcgattcggttctcatggcttacaatgcaacggcgaaagaggacctggtaaaagcgaacaactgcgtctttgatgccaatgtgatcggtgataacactgctgaaggctatgttcttaaaccgtgtgaacccaaatggttaccgaatgggacgcgtgtggcgatcaaatgcaagaactccaaattcagcgagaagaagaaaagtgacaaaccgatcaagacacaagtcccactgacggaaattgataagaatctgctggacgtattggcctgttatgtcactttaaaccgcgtgaacaacgtgatctctaagattggaacagtgacgccgaaagattttgagaaagtaatgtggctgactgttcaggatattctggaagaaacgtcacgtgagggtattgttctgacgacatcggacaatcctgacctcgtcaagaaagaacttgttcgcatggtgcaggatgtattagaatcggcatggcgcgaactggtgtcg

SEQ ID NO: 474 - protein, 343 aa, synthetic construct
  REGION 1..343: note = variant of RNA ligase 2 from Escherichia phage RB69 (Bacteriophage RB69)
MHHHHHHGGSGMFTKYSSLENHYNSKFIEKLYANGLTDGVWVAREKIHGTNFSLIIERDNVTCAKRTGPIKPAEDFYGYEIVLKKYDKAIKTVQKFMYTAGAVSYQVFGEFAGNGIMKEVDYGEKDFYVFDILINTESGDNTYLTDYEMQDFCNEFGFKMAPMLGRGTFDSLIMIPNDFDSVLMAYNATAKEDLVKANNCVFDANVIGDNTAEGYVLKPCEPKWLPNGTRVAIKCKNSKFSEKKKSDKPIKTQVPLTEIDKNLLDVLACYVTLNRVNNVISKIGTVTPKDFEKVMWLTVQDILEETSREGIVLTTSDNPDLVKKELVRMVQDVLESAWRELVS

SEQ ID NO: 475 - DNA, 1029 bp, synthetic construct
  misc_feature 1..1029: note = variant of RNA ligase 2 from Escherichia phage RB69 (Bacteriophage RB69)
  source 1..1029: mol_type = other DNA
atgcatcaccatcaccatcacggtggcagcggtatgtttacgaaatattctagtctggaaaaccattacaatagcaaattcattgagaaactctatgctaacggcttaactgatggtgtatgggttgcgcgcgaaaagatccacgggacgaacttttcgctgattatcgagcgtgataatgtaacatgcgccaaacgtacaggcccgattaagcctgcagaagacttctacggttatgaaatcgtcctgaagaaatacgataaagcgattaagacggtgcagaaatttatgtataccgccggcgcggtttcctaccaagtgttcggagaatttgctggcaacggtatcatgaaaggggtcgattatggcgagaaagacttctatgtgtttgatattctgatcaatacggaatcaggagacaacacgtacctgactgattatgaaatgcaggacttctgtaatgaatttgggtttaagatggcaccaatgcttggtcgcggcacattcgatagcctgattatgattccgaacgatttcgattcggttctcatggcttacaatgcaacggcgaaagaggacctggtaaaagcgaacaactgcgtctttgatgccaatgtgatcggtgataacactgctgaaggctatgttcttaaaccgtgtgaacccaaatggttaccgaatgggacgcgtgtggcgatcaaatgcaagaactccaaattcagcgagaagaagaaaagtgacaaaccgatcaagacacaagtcccactgacggaaattgataagaatctgctggacgtattggcctgttatgtcactttaaaccgcgtgaacaacgtgatctctaagattggaacagtgacgccgaaagattttgagaaagtaatgtggctgactgttcaggatattctggaagaaacgtcacgtgagggtattgttctgacgacatcggacaatcctgacctcgtcaagaaagaactttggcgcatggtgcaggatgtattagaatcggcatggcgcgaactggtgtcg

SEQ ID NO: 476 - protein, 343 aa, synthetic construct
  REGION 1..343: note = variant of RNA ligase 2 from Escherichia phage RB69 (Bacteriophage RB69)
MHHHHHHGGSGMFTKYSSLENHYNSKFIEKLYANGLTDGVWVAREKIHGTNFSLIIERDNVTCAKRTGPIKPAEDFYGYEIVLKKYDKAIKTVQKFMYTAGAVSYQVFGEFAGNGIMKGVDYGEKDFYVFDILINTESGDNTYLTDYEMQDFCNEFGFKMAPMLGRGTFDSLIMIPNDFDSVLMAYNATAKEDLVKANNCVFDANVIGDNTAEGYVLKPCEPKWLPNGTRVAIKCKNSKFSEKKKSDKPIKTQVPLTEIDKNLLDVLACYVTLNRVNNVISKIGTVTPKDFEKVMWLTVQDILEETSREGIVLTTSDNPDLVKKELWRMVQDVLESAWRELVS

SEQ ID NO: 477 - DNA, 1029 bp, synthetic construct
  misc_feature 1..1029: note = variant of RNA ligase 2 from Escherichia phage RB69 (Bacteriophage RB69)
  source 1..1029: mol_type = other DNA
atgcatcaccatcaccatcacggtggcagcggtatgtttaagaaatattctagtctggaaaaccattacaatagtgtgttcattgagaaactctatgctaacggcttaactgatggtgtatgggttgcgcgcgaaaagatccacgggacgaacttttcgctgattatcgagcgtgataatgtaacatgcgccaaacgtacaggcccgattaagcctgcagaaaccttctacggttatgaaatcgtcctgaagaaatacgataaagcgattaagacggtgcagaaatttatgtataccgccggcgccgtttcctaccaagtgttcggagaatttgctggcaacggtatctggaaaggggtcgattatggcgagaaagacttctatgtgtttgatattctgatcaatacggaatcaggagacaacacgtacctgactgattatgaaatgcaggacttctgtaatgaatttgggtttaagatggcaccaatgcttggtcgcggcacattcgatagcctgattatgattccgaacgatttcgattcggttctcatggcttacaatgcaacggcgaaagaggacctggtaaaagcgaacaactgcgtctttgatgccaatgtgatcggtgataacactgctgaaggctatgttcttaaaccgtgtgaacccaaatggttaccgaatgggacgcgtgtggcgatcaaatgcaagaactccaaattcagcgagaagaagaaaagtgacaaaccgatcaagacacaagtcccactgacggaaattgataagaatctgctggacgtattggcctgttatgtcactttaaaccgcgtgaacaacgtgatctctaagattggaacagtgacgccgaaagattttgagaaagtaatgggtctgactgttcaggatattctggaagaaacgtcacgtgagggtattgttctgacgacatcggacaatcctgacctcgtcaagaaagaactttggcgcatggtgcaggatgtattagaatcggcatggcgcgaactggtgtcg

SEQ ID NO: 478 - protein, 343 aa, synthetic construct
  REGION 1..343: note = variant of RNA ligase 2 from Escherichia phage RB69 (Bacteriophage RB69)
MHHHHHHGGSGMFKKYSSLENHYNSVFIEKLYANGLTDGVWVAREKIHGTNFSLIIERDNVTCAKRTGPIKPAETFYGYEIVLKKYDKAIKTVQKFMYTAGAVSYQVFGEFAGNGIWKGVDYGEKDFYVFDILINTESGDNTYLTDYEMQDFCNEFGFKMAPMLGRGTFDSLIMIPNDFDSVLMAYNATAKEDLVKANNCVFDANVIGDNTAEGYVLKPCEPKWLPNGTRVAIKCKNSKFSEKKKSDKPIKTQVPLTEIDKNLLDVLACYVTLNRVNNVISKIGTVTPKDFEKVMGLTVQDILEETSREGIVLTTSDNPDLVKKELWRMVQDVLESAWRELVS

SEQ ID NO: 479 - DNA, 1029 bp, synthetic construct
  misc_feature 1..1029: note = variant of RNA ligase 2 from Escherichia phage RB69 (Bacteriophage RB69)
  source 1..1029: mol_type = other DNA
atgcatcaccatcaccatcacggtggcagcggtatgtttaagaaatattctagtctggaaaaccattacaatctgaaattcattgagaagctctatgctaacggcttaactgatggtgtatgggttgcgcgcgaaaagatccacgggacgaacttttcgctgattatcgagcgtgataatgtaacatgcgccaaacgtacaggcccgattaagcctgcagaaaccttctacggttatgaaatcgtcctgaagaaatacgataaagcgattaagacggtgcagaaatttatgtataccgccggcgcggtttcctaccaagtgttcggagaatttgctggcaacggtatctggaaaggtgtcgattatggcgagaaagacttctatgtgtttgatattctgatcaatacggaatcaggagacaacacgtacctgactgattatgaaatgcaggacttctgtaatgaatttgggtttaagatggcaccaatgcttggtcgcggcacattcgatagcctgattatgattccgaacgatttcgattcggttctcatggcttacaatgcaacggcgaaagaggacctggtaaaagcgaacaactgcgtctttgatgccaatgtgatcggtgataacactgctgaaggctatgttcttaaaccgtgtgaacccaaatggttaccgaatgggacgcgtgtggcgatcaaatgcaagaactccaaattcagcgagaagaagaaaagtgacaaaccgatcaagacacaagtcccactgacggaaattgataagaatctgctggacgtattggcctgttatgtcactttaaaccgcgtgaacaacgtgatctctaagattggaacagtgacgccgaaagattttgagaaagtaatgggtctgactgttcaggatattctggaagaaacgtcacgtgagggtattgttctgacgacatcggacaatcctgacctcgtcaagaaagaacttgttcgcatggtgcaggatgtattagaatcggcatggcgcgaactggtgtcg

SEQ ID NO: 480 - protein, 343 aa, synthetic construct
  REGION 1..343: note = variant of RNA ligase 2 from Escherichia phage RB69 (Bacteriophage RB69)
MHHHHHHGGSGMFKKYSSLENHYNLKFIEKLYANGLTDGVWVAREKIHGTNFSLIIERDNVTCAKRTGPIKPAETFYGYEIVLKKYDKAIKTVQKFMYTAGAVSYQVFGEFAGNGIWKGVDYGEKDFYVFDILINTESGDNTYLTDYEMQDFCNEFGFKMAPMLGRGTFDSLIMIPNDFDSVLMAYNATAKEDLVKANNCVFDANVIGDNTAEGYVLKPCEPKWLPNGTRVAIKCKNSKFSEKKKSDKPIKTQVPLTEIDKNLLDVLACYVTLNRVNNVISKIGTVTPKDFEKVMGLTVQDILEETSREGIVLTTSDNPDLVKKELVRMVQDVLESAWRELVS

SEQ ID NO: 481 - DNA, 1029 bp, synthetic construct
  misc_feature 1..1029: note = variant of RNA ligase 2 from Escherichia phage RB69 (Bacteriophage RB69)
  source 1..1029: mol_type = other DNA
atgcatcaccatcaccatcacggtggcagcggtatgtttaagaaatattctagtctggaaaaccattacaattggaaattcattgagcatctctatgctaacggcttaactgatggtgtatgggttgcgcgcgaaaagatccacgggacgaacttttcgctgattatcgagcgtgataatgtaacatgcgccaaacgtacaggcccgattaagcctgcagaagacttctacggttatgaaatcgtcctgaagaaatacgataaagcgattaagacggtgcagaaatttatgtataccgccggcaccgtttcctaccaagtgttcggagaatttgctggcaacggtatctggaaaggtgtcgattatggcgagaaagacttctatgtgtttgatattctgatcaatacggaatcaggagacaacacgtacctgactgattatgaaatgcaggacttctgtaatgaatttgggtttaagatggcaccaatgcttggtcgcggcacattcgatagcctgattatgattccgaacgatttcgattcggttctcatggcttacaatgcaacggcgaaagaggacctggtaaaagcgaacaactgcgtctttgatgccaatgtgatcggtgataacactgctgaaggctatgttcttaaaccgtgtgaacccaaatggttaccgaatgggacgcgtgtggcgatcaaatgcaagaactccaaattcagcgagaagaagaaaagtgacaaaccgatcaagacacaagtcccactgacggaaattgataagaatctgctggacgtattggcctgttatgtcactttaaaccgcgtgaacaacgtgatctctaagattggaacagtgacgccgaaagattttgagaaagtaatgggtctgactgttcaggatattctggaagaaacgtcacgtgagggtattgttctgacgacatcggacaatcctgacctcgtcaagaaagaacttgttcgcatggtgcaggatgtattagaatcggcatggcgcgaactggtgtcg

SEQ ID NO: 482 - protein, 343 aa, synthetic construct
  REGION 1..343: note = variant of RNA ligase 2 from Escherichia phage RB69 (Bacteriophage RB69)
MHHHHHHGGSGMFKKYSSLENHYNWKFIEHLYANGLTDGVWVAREKIHGTNFSLIIERDNVTCAKRTGPIKPAEDFYGYEIVLKKYDKAIKTVQKFMYTAGTVSYQVFGEFAGNGIWKGVDYGEKDFYVFDILINTESGDNTYLTDYEMQDFCNEFGFKMAPMLGRGTFDSLIMIPNDFDSVLMAYNATAKEDLVKANNCVFDANVIGDNTAEGYVLKPCEPKWLPNGTRVAIKCKNSKFSEKKKSDKPIKTQVPLTEIDKNLLDVLACYVTLNRVNNVISKIGTVTPKDFEKVMGLTVQDILEETSREGIVLTTSDNPDLVKKELVRMVQDVLESAWRELVS

SEQ ID NO: 483 - DNA, 1029 bp, synthetic construct
  misc_feature 1..1029: note = variant of RNA ligase 2 from Escherichia phage RB69 (Bacteriophage RB69)
  source 1..1029: mol_type = other DNA
atgcatcaccatcaccatcacggtggcagcggtatgtttaagaaatattctagtctggaaaaccattacaatagcaaattcattgagaaactctatgctaacggcttaactgatggtgtatgggttgcgcgcgaaaagatccacgggacgaacttttcgctgattatcgagcgtgataatgtaacatgcgccaaacgtacaggcccgattaagcctgcagaagacttctacggttatgaaatcgtcctgaagaaatacgataaagcgattaagacggtgcagaaatttatgtataccgccggcgccgtttcctaccaagtgttcggagaatttgctggcaacggtatcatgaaaggggtcgattatggcgagaaagacttctatgtgtttgatattctgatcaatacggaatcaggagacaacacgtacctgactgattatgaaatgcaggacttctgtaatgaatttgggtttaagatggcaccaatgcttggtcgcggcacattcgatagcctgattatgattccgaacgatttcgattcggttctcatggcttacaatgcaacggcgaaagaggacctggtaaaagcgaacaactgcgtctttgatgccaatgtgatcggtgataacactgctgaaggctatgttcttaaaccgtgtgaacccaaatggttaccgaatgggacgcgtgtggcgatcaaatgcaagaactccaaattcagcgagaagaagaaaagtgacaaaccgatcaagacacaagtcccactgacggaaattgataagaatctgctggacgtattggcctgttatgtcactttaaaccgcgtgaacaacgtgatctctaagattggaacagtgacgccgaaagattttgagaaagtaatgggtctgactgttcaggatattctggaagaaacgtcacgtgagggtattgttctgacgacatcggacaatcctgacctcgtcaagaaagaacttgtccgcatggtgcaggatgtattagaatcggcatggcgcgaactggtgtcg

SEQ ID NO: 484 - protein, 343 aa, synthetic construct
  REGION 1..343: note = variant of RNA ligase 2 from Escherichia phage RB69 (Bacteriophage RB69)
MHHHHHHGGSGMFKKYSSLENHYNSKFIEKLYANGLTDGVWVAREKIHGTNFSLIIERDNVTCAKRTGPIKPAEDFYGYEIVLKKYDKAIKTVQKFMYTAGAVSYQVFGEFAGNGIMKGVDYGEKDFYVFDILINTESGDNTYLTDYEMQDFCNEFGFKMAPMLGRGTFDSLIMIPNDFDSVLMAYNATAKEDLVKANNCVFDANVIGDNTAEGYVLKPCEPKWLPNGTRVAIKCKNSKFSEKKKSDKPIKTQVPLTEIDKNLLDVLACYVTLNRVNNVISKIGTVTPKDFEKVMGLTVQDILEETSREGIVLTTSDNPDLVKKELVRMVQDVLESAWRELVS

SEQ ID NO: 485 - DNA, 1029 bp, synthetic construct
  misc_feature 1..1029: note = variant of RNA ligase 2 from Escherichia phage RB69 (Bacteriophage RB69)
  source 1..1029: mol_type = other DNA
atgcatcaccatcaccatcacggtggcagcggtatgtttaagaaatattctagtctggaaaaccattacaatagcaaattcattgagaagctctatgctaacggcttaactgatggtgtatgggttgcgcgcgaaaagatccacgggacgaacttttcgctgattatcgagcgtgataatgtaacatgcgccaaacgtacaggcccgattaagcctgcagaagacttctacggttatgaaatcgtcctgaagaaatacgataaagcgattaagacggtgcagaaatttatgtataccgccggcgcggtttcctaccaagtgttcggagaatttgctggcaacggtatcatgaaagaggtcgattatggcgagaaagacttctatgtgtttgatattctgatcaatacggaatcaggagacaacacgtacctgactgattatgaaatgcaggacttctgtaatgaatttgggtttaagatggcaccaatgcttggtcgcggcacattcgatagcctgattatgattccgaacgatttcgattcggttctcatggcttacaatgcaacggcgaaagaggacctggtaaaagcgaacaactgcgtctttgatgccaatgtgatcggtgataacactgctgaaggctatgttcttaaaccgtgtgaacccaaatggttaccgaatgggacgcgtgtggcgatcaaatgcaagaactccaaattcagcgagaagaagaaaagtgacaaaccgatcaagacacaagtcccactgacggaaattgataagaatctgctggacgtattggcctgttatgtcactttaaaccgcgtgaacaacgtgatctctaagattggaacagtgacgccgaaagattttgagaaagtaatgggtctgactgttcaggatattctggaagaaacgtcacgtgagggtattgttctgacgacatcggacaatcctgacctcgtcaagaaagaacttgttcgcatggtgcaggatgtattagaatcggcatggcgcgaactggtgtcg

SEQ ID NO: 486 - protein, 343 aa, synthetic construct
  REGION 1..343: note = variant of RNA ligase 2 from Escherichia phage RB69 (Bacteriophage RB69)
MHHHHHHGGSGMFKKYSSLENHYNSKFIEKLYANGLTDGVWVAREKIHGTNFSLIIERDNVTCAKRTGPIKPAEDFYGYEIVLKKYDKAIKTVQKFMYTAGAVSYQVFGEFAGNGIMKEVDYGEKDFYVFDILINTESGDNTYLTDYEMQDFCNEFGFKMAPMLGRGTFDSLIMIPNDFDSVLMAYNATAKEDLVKANNCVFDANVIGDNTAEGYVLKPCEPKWLPNGTRVAIKCKNSKFSEKKKSDKPIKTQVPLTEIDKNLLDVLACYVTLNRVNNVISKIGTVTPKDFEKVMGLTVQDILEETSREGIVLTTSDNPDLVKKELVRMVQDVLESAWRELVS

SEQ ID NO: 487 - DNA, 1029 bp, synthetic construct
  misc_feature 1..1029: note = variant of RNA ligase 2 from Escherichia phage RB69 (Bacteriophage RB69)
  source 1..1029: mol_type = other DNA
atgcatcaccatcaccatcacggtggcagcggtatgtttaagaaatattctagtctggaaaaccattacaatagcaaattcattgagaaactctatgctaacggcttaactgatggtgtatgggttgcgcgcgaaaagatccacgggacgaacttttcgctgattatcgagcgtgataatgtaacatgcgccaaacgtacaggcccgattaagcctgcagaagacttctacggttatgaaatcgtcctgaagaaatacgataaagcgattaagacggtgcagaaatttatgtataccgccggcgcggtttcctaccaagtgttcggagaatttgctggcaacggtatcatgaaagaggtcgattatggcgagaaagacttctatgtgtttgatattctgatcaatacggaatcaggagacaacacgtacctgactgattatgaaatgcaggacttctgtaatgaatttgggtttaagatggcaccaatgcttggtcgcggcacattcgatagcctgattatgattccgaacgatttcgattcggttctcatggcttacaatgcaacggcgaaagaggacctggtaaaagcgaacaactgcgtctttgatgccaatgtgatcggtgataacactgctgaaggctatgttcttaaaccgtgtgaacccaaatggttaccgaatgggacgcgtgtggcgatcaaatgcaagaactccaaattcagcgagaagaagaaaagtgacaaaccgatcaagacacaagtcccactgacggaaattgataagaatctgctggacgtattggcctgttatgtcactttaaaccgcgtgaacaacgtgatctctaagattggaacagtgacgccgaaagattttgagaaagtaatgtggctgactgttcaggatattctggaagaaacgtcacgtgagggtattgttctgacgacatcggacaatcctgacctcgtcaagaaagaacttgtccgcatggtgcaggatgtattagaatcggcatggcgcgaactggtgtcg

SEQ ID NO: 488 - protein, 343 aa, synthetic construct
  REGION 1..343: note = variant of RNA ligase 2 from Escherichia phage RB69 (Bacteriophage RB69)
MHHHHHHGGSGMFKKYSSLENHYNSKFIEKLYANGLTDGVWVAREKIHGTNFSLIIERDNVTCAKRTGPIKPAEDFYGYEIVLKKYDKAIKTVQKFMYTAGAVSYQVFGEFAGNGIMKEVDYGEKDFYVFDILINTESGDNTYLTDYEMQDFCNEFGFKMAPMLGRGTFDSLIMIPNDFDSVLMAYNATAKEDLVKANNCVFDANVIGDNTAEGYVLKPCEPKWLPNGTRVAIKCKNSKFSEKKKSDKPIKTQVPLTEIDKNLLDVLACYVTLNRVNNVISKIGTVTPKDFEKVMWLTVQDILEETSREGIVLTTSDNPDLVKKELVRMVQDVLESAWRELVS

SEQ ID NO: 489 - DNA, 1029 bp, synthetic construct
  misc_feature 1..1029: note = variant of RNA ligase 2 from Escherichia phage RB69 (Bacteriophage RB69)
  source 1..1029: mol_type = other DNA
atgcatcaccatcaccatcacggtggcagcggtatgtttaagaaatattctagtctggaaaaccattacaatagcaaattcattgagaaactctatgctaacggcttaactgatggtgtatgggttgcgcgcgaaaagatccacgggacgaacttttcgctgattatcgagcgtgataatgtaacatgcgccaaacgtacaggcccgattaagcctgcagaaaccttctacggttatgaaatcgtcctgaagaaatacgataaagcgattaagacggtgcagaaatttatgtataccgccggcgccgtttcctaccaagtgttcggagaatttgctggcaacggtatctggaaaggggtcgattatggcgagaaagacttctatgtgtttgatattctgatcaatgcggaatcaggagacaacacgtacctgactgattatgaaatgcaggacttctgtaatgaatttgggtttaagatggcaccaatgcttggtcgcggcacattcgatagcctgattatgattccgaacgatttcgattcggttctcatggcttacaatgcaacggcgaaagaggacctggtaaaagcgaacaactgcgtctttgatgccaatgtgatcggtgataacactgctgaaggctatgttcttaaaccgtgtgaacccaaatggttaccgaatgggacgcgtgtggcgatcaaatgcaagaactccaaattcagcgagaagaagaaaagtgacaaaccgatcaagacacaagtcccactgacggaaattgataagaatctgctggacgtattggcctgttatgtcactttaaaccgcgtgaacaacgtgatctctaagattggaacagtgacgccgaaagattttgagaaagtaatgtggctgactgttcaggatattctggaagaaacgtcacgtgagggtattgttctgacgacatcggacaatcctgacctcgtcaagaaagaacttgtccgcatggtgcagcgtgtattagaatcggcatggcgcgaactggtgtcg

SEQ ID NO: 490 - protein, 343 aa, synthetic construct
  REGION 1..343: note = variant of RNA ligase 2 from Escherichia phage RB69 (Bacteriophage RB69)
MHHHHHHGGSGMFKKYSSLENHYNSKFIEKLYANGLTDGVWVAREKIHGTNFSLIIERDNVTCAKRTGPIKPAETFYGYEIVLKKYDKAIKTVQKFMYTAGAVSYQVFGEFAGNGIWKGVDYGEKDFYVFDILINAESGDNTYLTDYEMQDFCNEFGFKMAPMLGRGTFDSLIMIPNDFDSVLMAYNATAKEDLVKANNCVFDANVIGDNTAEGYVLKPCEPKWLPNGTRVAIKCKNSKFSEKKKSDKPIKTQVPLTEIDKNLLDVLACYVTLNRVNNVISKIGTVTPKDFEKVMWLTVQDILEETSREGIVLTTSDNPDLVKKELVRMVQRVLESAWRELVS

SEQ ID NO: 491 - DNA, 1029 bp, synthetic construct
  misc_feature 1..1029: note = variant of RNA ligase 2 from Escherichia phage RB69 (Bacteriophage RB69)
  source 1..1029: mol_type = other DNA
atgcatcaccatcaccatcacggtggcagcggtatgtttaagaaatattctagtctggaaaaccattacaatagcaaattcattgagaaactctatgctaacggcttaactgatggtgtatgggttgcgcgcgaaaagatccacgggacgaacttttcgctgattatcgagcgtgataatgtaacatgcgccaaacgtacaggcccgattaagcctgcagaaaccttctacggttatgaaatcgtcctgaagaaatacgataaagcgattaagacggtgcagaaatttatgtataccgccggcgccgtttcctaccaagtgttcggagaatttgctggcaacggtatctggaaaggggtcgattatggcgagaaagacttctatgtgtttgatattctgatcaatgcggaatcaggagacaacacgtacctgactgattatgaaatgcaggacttctgtaatgaatgtgggtttaagatggcaccaatgcttggtcgcggcacattcgatagcctgattatgattccgaacgatttcgattcggttctcatggcttacaatgcaacggcgaaagaggacctggtaaaagcgaacaactgcgtctttgatgccaatgtgatcggtgataacactgctgaaggctatgttcttaaaccgtgtgaacccaaatggttaccgaatgggacgcgtgtggcgatcaaatgcaagaactccaaattcagcgagaagaagaaaagtgacaaaccgatcaagacacaagtcccactgacggaaattgataagaatctgctggacgtattggcctgttatgtcactttaaaccgcgtgaacaacgtgatctctaagattggaacagtgacgccgaaagattttgagaaagtaatgtggctgactgttcaggatattctggaagaaacgtcacgtgagggtattgttctgacgacatcggacaatcctgacctcgtcaagaaagaacttgtccgcatggtgcaggatgtattagaatcggcatggcgcgaactggtgtcg

SEQ ID NO: 492 - protein, 343 aa, synthetic construct
  REGION 1..343: note = variant of RNA ligase 2 from Escherichia phage RB69 (Bacteriophage RB69)
MHHHHHHGGSGMFKKYSSLENHYNSKFIEKLYANGLTDGVWVAREKIHGTNFSLIIERDNVTCAKRTGPIKPAETFYGYEIVLKKYDKAIKTVQKFMYTAGAVSYQVFGEFAGNGIWKGVDYGEKDFYVFDILINAESGDNTYLTDYEMQDFCNECGFKMAPMLGRGTFDSLIMIPNDFDSVLMAYNATAKEDLVKANNCVFDANVIGDNTAEGYVLKPCEPKWLPNGTRVAIKCKNSKFSEKKKSDKPIKTQVPLTEIDKNLLDVLACYVTLNRVNNVISKIGTVTPKDFEKVMWLTVQDILEETSREGIVLTTSDNPDLVKKELVRMVQDVLESAWRELVS

SEQ ID NO: 493 - DNA, 1029 bp, synthetic construct
  misc_feature 1..1029: note = variant of RNA ligase 2 from Escherichia phage RB69 (Bacteriophage RB69)
  source 1..1029: mol_type = other DNA
atgcatcaccatcaccatcacggtggcagcggtatgtttaagaaatattctagtctggaaaaccattacaatagcaaattcattgagaaactatatgctaacggcttaactgatggtgtatgggttgcgcgcgaaaagatccacgggacgaacttttcgctgattatcgagcgtgataatgtaacatgcgccaaacgtacaggcccgattaagcctgcagaaaccttctacggttatgaaatcgtcctgaagaaatacgataaagcgattaagacggtgcagaaatttatgtataccgccggcgccgtttcctaccaagtgttcggagaatttgctggcaacggtatctggaaaggggtcgattatggcgagaaagacttctatgtgtttgatattctgatcaatgcggaatcaggagacaacacgtacctgactgattatgaaatgcaggacttctgtaatgaatttgggtttaagatggcaccaatgcttggtcgcggcacattcgatagcctgattatgattccgctggatttcgattcggttctcatggcttacaatgcaacggcgaaagaggacctggtaaaagcgaacaactgcgtctttgatgccaatgtgatcggtgataacactgctgaaggctatgttcttaaaccgtgtgaacccaaatggttaccgaatgggacgcgtgtggcgatcaaatgcaagaactccaaattcagcgagaagaagaaaagtgacaaaccgatcaagacacaagtcccactgacggaaattgataagaatctgctggacgtattggcctgttatgtcactttaaaccgcgtgaacaacgtgatctctaagattggaacagtgacgccgaaagattttgagaaagtaatgtggctgactgttcaggatattctggaagaaacgtcacgtgagggtattgttctgacgacatcggacaatcctgacctcgtcaagaaagaacttgtccgcatggtgcaggatgtattagaatcggcatggcgcgaactggtgtcg

SEQ ID NO: 494 - protein, 343 aa, synthetic construct
  REGION 1..343: note = variant of RNA ligase 2 from Escherichia phage RB69 (Bacteriophage RB69)
MHHHHHHGGSGMFKKYSSLENHYNSKFIEKLYANGLTDGVWVAREKIHGTNFSLIIERDNVTCAKRTGPIKPAETFYGYEIVLKKYDKAIKTVQKFMYTAGAVSYQVFGEFAGNGIWKGVDYGEKDFYVFDILINAESGDNTYLTDYEMQDFCNEFGFKMAPMLGRGTFDSLIMIPLDFDSVLMAYNATAKEDLVKANNCVFDANVIGDNTAEGYVLKPCEPKWLPNGTRVAIKCKNSKFSEKKKSDKPIKTQVPLTEIDKNLLDVLACYVTLNRVNNVISKIGTVTPKDFEKVMWLTVQDILEETSREGIVLTTSDNPDLVKKELVRMVQDVLESAWRELVS

SEQ ID NO: 495 - DNA, 1029 bp, synthetic construct
  misc_feature 1..1029: note = variant of RNA ligase 2 from Escherichia phage RB69 (Bacteriophage RB69)
  source 1..1029: mol_type = other DNA
atgcatcaccatcaccatcacggtggcagcggtatgtttaagaaatattctagtctggaaaaccattacaatagcaaattcattgagaaactctatgctaacggcttaactgatggtgtatgggttgcgcgcgaaaagatccacgggacgaacttttcgctgattatcgagcgtgataatgtaacatgcgccaaacgtacaggcccgattaagcctgcagaaaccttctacggttatgaaatcgtcctgaagaaatacgataaagcgattaagacggtgcagaaatttatgtataccgccggcgccgtttcctaccaagtgttcggagaatttgctggcaacggtatctggaaaggggtcgattatggcgagaaagacttctatgtgtttgatattctgatcaatgcggaatcaggagacaacacgtacctgactgattatgaaatgcaggacttctgtaatgaatttgggtttaagatggcaccaatgcttggtcgcggcacattcgatagcctgattatgattccgaacgatttcgattcggttctcatggcttacaatgcaacggcgaaagaggacctggtaaaagcgaacaactgcgtctttgatgccaatgtgatcggtgataacactgctgaaggctatgttcttaaaccgtgtgaacccaaatggttaccgaatgggacgcgtgtggcgatcaaatgcaagaactccaaattcagcgagaagaagaaaagtgacaaaccgatcaagacacaagtcccactgacggaaattgataagaatctgctggacgtattggcctgttatgtcactttaaaccgcgtgaacaacgtgatctctaagattggaacagtgacgccgaaagattttgagaaagtaatgtggctgactgttcaggatattctggaagaaacgtcacgtgagggtattgttctgacgacatcggacaatcctgacctcgtcaagaaagaacttgtccgcatggtgcaggatgctttagaatcggcatggcgcgaactggtgtcg

SEQ ID NO: 496 - protein, 343 aa, synthetic construct
  REGION 1..343: note = variant of RNA ligase 2 from Escherichia phage RB69 (Bacteriophage RB69)
MHHHHHHGGSGMFKKYSSLENHYNSKFIEKLYANGLTDGVWVAREKIHGTNFSLIIERDNVTCAKRTGPIKPAETFYGYEIVLKKYDKAIKTVQKFMYTAGAVSYQVFGEFAGNGIWKGVDYGEKDFYVFDILINAESGDNTYLTDYEMQDFCNEFGFKMAPMLGRGTFDSLIMIPNDFDSVLMAYNATAKEDLVKANNCVFDANVIGDNTAEGYVLKPCEPKWLPNGTRVAIKCKNSKFSEKKKSDKPIKTQVPLTEIDKNLLDVLACYVTLNRVNNVISKIGTVTPKDFEKVMWLTVQDILEETSREGIVLTTSDNPDLVKKELVRMVQDALESAWRELVS

SEQ ID NO: 497 - DNA, 1029 bp, synthetic construct
  misc_feature 1..1029: note = variant of RNA ligase 2 from Escherichia phage RB69 (Bacteriophage RB69)
  source 1..1029: mol_type = other DNA
atgcatcaccatcaccatcacggtggcagcggtatgtttaagaaatattctagtctggaaaaccattacaatagcaaattcattgagaaactctatgctaacggcttaactgatggtgtatgggttgcgcgcgaaaagatccacgggacgaacttttcgctgattatcgagcgtgataatgtaacatgcgccaaacgtacaggcccgattaagcctgcagaaaccttctacggttatgaaatcgtcctgaagaaatacgataaagcgattaagacggtgcagaaagctatgtataccgccggcgccgtttcctaccaagtgttcggagaatttgctggcaacggtatctggaaaggggtcgattatggcgagaaagacttctatgtgtttgatattctgatcaatgcggaatcaggagacaacacgtacctgactgattatgaaatgcaggacttctgtaatgaatttgggtttaagatggcaccaatgcttggtcgcggcacattcgatagcctgattatgattccgaacgatttcgattcggttctcatggcttacaatgcaacggcgaaagaggacctggtaaaagcgaacaactgcgtctttgatgccaatgtgatcggtgataacactgctgaaggctatgttcttaaaccgtgtgaacccaaatggttaccgaatgggacgcgtgtggcgatcaaatgcaagaactccaaattcagcgagaagaagaaaagtgacaaaccgatcaagacacaagtcccactgacggaaattgataagaatctgctggacgtattggcctgttatgtcactttaaaccgcgtgaacaacgtgatctctaagattggaacagtgacgccgaaagattttgagaaagtaatgtggctgactgttcaggatattctggaagaaacgtcacgtgagggtattgttctgacgacatcggacaatcctgacctcgtcaagaaagaacttgtccgcatggtgcaggatgtattagaatcggcatggcgcgaactggtgtcg

SEQ ID NO: 498 - protein, 343 aa, synthetic construct
  REGION 1..343: note = variant of RNA ligase 2 from Escherichia phage RB69 (Bacteriophage RB69)
MHHHHHHGGSGMFKKYSSLENHYNSKFIEKLYANGLTDGVWVAREKIHGTNFSLIIERDNVTCAKRTGPIKPAETFYGYEIVLKKYDKAIKTVQKAMYTAGAVSYQVFGEFAGNGIWKGVDYGEKDFYVFDILINAESGDNTYLTDYEMQDFCNEFGFKMAPMLGRGTFDSLIMIPNDFDSVLMAYNATAKEDLVKANNCVFDANVIGDNTAEGYVLKPCEPKWLPNGTRVAIKCKNSKFSEKKKSDKPIKTQVPLTEIDKNLLDVLACYVTLNRVNNVISKIGTVTPKDFEKVMWLTVQDILEETSREGIVLTTSDNPDLVKKELVRMVQDVLESAWRELVS

SEQ ID NO: 499 - DNA, 1029 bp, synthetic construct
  misc_feature 1..1029: note = variant of RNA ligase 2 from Escherichia phage RB69 (Bacteriophage RB69)
  source 1..1029: mol_type = other DNA
atgcatcaccatcaccatcacggtggcagcccgatgtttaagaaatattctagtctggaaaaccattacaatagcaaattcattgagaaactctatgctaacggcttaactgatggtgtatgggttgcgcgcgaaaagatccacgggacgaacttttcgctgattatcgagcgtgataatgtaacatgcgccaaacgtacaggcccgattaagcctgcagaaaccttctacggttatgaaatcgtcctgaagaaatacgataaagcgattaagacggtgcagaaatttatgtataccgccggcgccgtttcctaccaagtgttcggagaatttgctggcaacggtatctggaaaggggtcgattatggcgagaaagacttctatgtgtttgatattctgatcaatgcggaatcaggagacaacacgtacctgactgattatgaaatgcaggacttctgtaatgaatttgggtttaagatggcaccaatgcttggtcgcggcacattcgatagcctgattatgattccgaacgatttcgattcggttctcatggcttacaatgcaacggcgaaagaggacctggtaaaagcgaacaactgcgtctttgatgccaatgtgatcggtgataacactgctgaaggctatgttcttaaaccgtgtgaacccaaatggttaccgaatgggacgcgtgtggcgatcaaatgcaagaactccaaattcagcgagaagaagaaaagtgacaaaccgatcaagacacaagtcccactgacggaaattgataagaatctgctggacgtattggcctgttatgtcactttaaaccgcgtgaacaacgtgatctctaagattggaacagtgacgccgaaagattttgagaaagtaatgtggctgactgttcaggatattctggaagaaacgtcacgtgagggtattgttctgacgacatcggacaatcctgacctcgtcaagaaagaacttgtccgcatggtgcaggatgtattagaatcggcatggcgcgaactggtgtcg

SEQ ID NO: 500 - protein, 343 aa, synthetic construct
  REGION 1..343: note = variant of RNA ligase 2 from Escherichia phage RB69 (Bacteriophage RB69)
MHHHHHHGGSPMFKKYSSLENHYNSKFIEKLYANGLTDGVWVAREKIHGTNFSLIIERDNVTCAKRTGPIKPAETFYGYEIVLKKYDKAIKTVQKFMYTAGAVSYQVFGEFAGNGIWKGVDYGEKDFYVFDILINAESGDNTYLTDYEMQDFCNEFGFKMAPMLGRGTFDSLIMIPNDFDSVLMAYNATAKEDLVKANNCVFDANVIGDNTAEGYVLKPCEPKWLPNGTRVAIKCKNSKFSEKKKSDKPIKTQVPLTEIDKNLLDVLACYVTLNRVNNVISKIGTVTPKDFEKVMWLTVQDILEETSREGIVLTTSDNPDLVKKELVRMVQDVLESAWRELVS

SEQ ID NO: 501 - DNA, 1029 bp, synthetic construct
  misc_feature 1..1029: note = variant of RNA ligase 2 from Escherichia phage RB69 (Bacteriophage RB69)
  source 1..1029: mol_type = other DNA
atgcatcaccatcaccatcacggtggcagcggtatgtttaagaaatattctagtctggaaaaccattacaatagcaaattcattgagaaactctatgctaacggcttaactgatggtgtatgggttgcgcgcgaaaagatccacgggacgaacttttcgctgattatcgagcgtgataatgtaacatgcgccaaacgtacaggcccgattaagcctgcagaaaccttctacggttatgaaatcgtcctgaagaaatacgataaagcgattaagacggtgcagaaatttatgtataccgccggcgccgtttcctaccaagtgttcggagaatttgctggcaacggtatctggaaaggggtcgattatggcgagaaagacttctatgtgtttgatattctgatcaatgcggaatcaggagacaacacgtacctgactgattatgaaatgcaggacttctgtaatgaatatgggtttaagatggcaccaatgcttggtcgcggcacattcgatagcctgattatgattccgaacgatttcgattcggttctcatggcttacaatgcaacggcgaaagaggacctggtaaaagcgaacaactgcgtctttgatgccaatgtgatcggtgataacactgctgaaggctatgttcttaaaccgtgtgaacccaaatggttaccgaatgggacgcgtgtggcgatcaaatgcaagaactccaaattcagcgagaagaagaaaagtgacaaaccgatcaagacacaagtcccactgacggaaattgataagaatctgctggacgtattggcctgttatgtcactttaaaccgcgtgaacaacgtgatctctaagattggaacagtgacgccgaaagattttgagaaagtaatgtggctgactgttcaggatattctggaagaaacgtcacgtgagggtattgttctgacgacatcggacaatcctgacctcgtcaagaaagaacttgtccgcatggtgcaggatgtattagaatcggcatggcgcgaactggtgtcg

SEQ ID NO: 502 - protein, 343 aa, synthetic construct
  REGION 1..343: note = variant of RNA ligase 2 from Escherichia phage RB69 (Bacteriophage RB69)
MHHHHHHGGSGMFKKYSSLENHYNSKFIEKLYANGLTDGVWVAREKIHGTNFSLIIERDNVTCAKRTGPIKPAETFYGYEIVLKKYDKAIKTVQKFMYTAGAVSYQVFGEFAGNGIWKGVDYGEKDFYVFDILINAESGDNTYLTDYEMQDFCNEYGFKMAPMLGRGTFDSLIMIPNDFDSVLMAYNATAKEDLVKANNCVFDANVIGDNTAEGYVLKPCEPKWLPNGTRVAIKCKNSKFSEKKKSDKPIKTQVPLTEIDKNLLDVLACYVTLNRVNNVISKIGTVTPKDFEKVMWLTVQDILEETSREGIVLTTSDNPDLVKKELVRMVQDVLESAWRELVS

SEQ ID NO: 503 - DNA, 1029 bp, synthetic construct
  misc_feature 1..1029: note = variant of RNA ligase 2 from Escherichia phage RB69 (Bacteriophage RB69)
  source 1..1029: mol_type = other DNA
atgcatcaccatcaccatcacggtggcagcggtatgtttaagaaatattctagtctggaaaaccattacaatagcaaattcattgagaaactctatgctaacggcttaactgatggtgtatgggttgcgcgcgaaaagatccacgggacgaacttttcgctgattatcgagcgtgataatgtaacatgcgccaaacgtacaggcccgattaagcctgcagaaaccttctacggttatgaaatcgtcctgaagaaatacgataaagcgattaagacggtgcagaaatttatgtataccgccggcgccgtttcctaccaagtgttcggagaatttgctggcaacggtatctggaaaggggtcgattatggcgagaaagacttctatgtgtttgatattctgatcaatgcggaatcaggagacaacacgtacctgactgattatgaaatgcaggacttctgtaatgaatttgggtttaagatggcaccaatgcttggtcgcggcacattcgatagcctgattatgattccgaacgatttcgattcggttctcatggcttacaatgcattggcgaaagaggacctggtaaaagcgaacaactgcgtctttgatgccaatgtgatcggtgataacactgctgaaggctatgttcttaaaccgtgtgaacccaaatggttaccgaatgggacgcgtgtggcgatcaaatgcaagaactccaaattcagcgagaagaagaaaagtgacaaaccgatcaagacacaagtcccactgacggaaattgataagaatctgctggacgtattggcctgttatgtcactttaaaccgcgtgaacaacgtgatctctaagattggaacagtgacgccgaaagattttgagaaagtaatgtggctgactgttcaggatattctggaagaaacgtcacgtgagggtattgttctgacgacatcggacaatcctgacctcgtcaagaaagaacttgtccgcatggtgcaggatgtattagaatcggcatggcgcgaactggtgtcg

SEQ ID NO: 504 - protein, 343 aa, synthetic construct
  REGION 1..343: note = variant of RNA ligase 2 from Escherichia phage RB69 (Bacteriophage RB69)
MHHHHHHGGSGMFKKYSSLENHYNSKFIEKLYANGLTDGVWVAREKIHGTNFSLIIERDNVTCAKRTGPIKPAETFYGYEIVLKKYDKAIKTVQKFMYTAGAVSYQVFGEFAGNGIWKGVDYGEKDFYVFDILINAESGDNTYLTDYEMQDFCNEFGFKMAPMLGRGTFDSLIMIPNDFDSVLMAYNALAKEDLVKANNCVFDANVIGDNTAEGYVLKPCEPKWLPNGTRVAIKCKNSKFSEKKKSDKPIKTQVPLTEIDKNLLDVLACYVTLNRVNNVISKIGTVTPKDFEKVMWLTVQDILEETSREGIVLTTSDNPDLVKKELVRMVQDVLESAWRELVS

SEQ ID NO: 505 - DNA, 1029 bp, synthetic construct
  misc_feature 1..1029: note = variant of RNA ligase 2 from Escherichia phage RB69 (Bacteriophage RB69)
  source 1..1029: mol_type = other DNA
atgcatcaccatcaccatcacggtggcagcggtatgtttaagaaatattctagtctggaaaaccattacaatagcaaattcattgagaaactctatgctaacggcttaactgatggtgtatgggttgcgcgcgaaaagatccacgggacgaacttttcgctgattatcgagcgtgataatgtaacatgcgccaaacgtacaggcccgattaagcctgcagaaaccttctacggttatgaaatcgtcctgaagaaatacgataaagcgattaagacggtgcagaaatttatgtataccgccggcgccgtttcctaccaagtgttcggagaatttgctggcaacggtatctggaaaggggtcgattatggcgagaaagacttctatgtgtttgatattctgatcaatgcggaatcaggagacaacacgtacctgactgattatgaaatgcaggacttctgtaatgaatttgggtttaagatggcaccaatgcttggtcgcggcacattcgatagcctgattatgattccgattgatttcgattcggttctcatggcttacaatgcaacggcgaaagaggacctggtaaaagcgaacaactgcgtctttgatgccaatgtgatcggtgataacactgctgaaggctatgttcttaaaccgtgtgaacccaaatggttaccgaatgggacgcgtgtggcgatcaaatgcaagaactccaaattcagcgagaagaagaaaagtgacaaaccgatcaagacacaagtcccactgacggaaattgataagaatctgctggacgtattggcctgttatgtcactttaaaccgcgtgaacaacgtgatctctaagattggaacagtgacgccgaaagattttgagaaagtaatgtggctgactgttcaggatattctggaagaaacgtcacgtgagggtattgttctgacgacatcggacaatcctgacctcgtcaagaaagaacttgtccgcatggtgcaggatgtattagaatcggcatggcgcgaactggtgtcg

SEQ ID NO: 506 - protein, 343 aa, synthetic construct
  REGION 1..343: note = variant of RNA ligase 2 from Escherichia phage RB69 (Bacteriophage RB69)
MHHHHHHGGSGMFKKYSSLENHYNSKFIEKLYANGLTDGVWVAREKIHGTNFSLIIERDNVTCAKRTGPIKPAETFYGYEIVLKKYDKAIKTVQKFMYTAGAVSYQVFGEFAGNGIWKGVDYGEKDFYVFDILINAESGDNTYLTDYEMQDFCNEFGFKMAPMLGRGTFDSLIMIPIDFDSVLMAYNATAKEDLVKANNCVFDANVIGDNTAEGYVLKPCEPKWLPNGTRVAIKCKNSKFSEKKKSDKPIKTQVPLTEIDKNLLDVLACYVTLNRVNNVISKIGTVTPKDFEKVMWLTVQDILEETSREGIVLTTSDNPDLVKKELVRMVQDVLESAWRELVS

SEQ ID NO: 507 - DNA, 1029 bp, synthetic construct
  misc_feature 1..1029: note = variant of RNA ligase 2 from Escherichia phage RB69 (Bacteriophage RB69)
  source 1..1029: mol_type = other DNA
atgcatcaccatcaccatcacggtggcagcggtatgtttaagaaatattctagtctggaaaaccattacaatagcaaattcattgagaaactctatgctaacggcttaactgatggtgtatgggttgcgcgcgaaaagatccacgggacgaacttttcgctgattatcgagcgtgataatgtaacatgcgccaaacgtacaggcccgattaagcctgcagaaaccttctacggttatgaaatcgtcctgaagaaatacgataaagcgattaagacggtgcagaaatttatgtataccgccggcgccgtttcctaccaagtgttcggagaatttgctggcaacggtatctggaaaggggtcgattatggcgagaaagacttctatgtgtttgatattctgatcaatgcggaatcaggagacaacacgtacctgactgattatgaaatgcaggacttctgtaatgaatttgggtttaagatggcaccaatgcttggtcgcggcacattcgatagcctgattatgattccgaacgatttcgattcggttctcatggcttacaatgcaacggcgaaagaggacctggtaaaagcgaacaactgcgtctttgatgccaatgtgatcggtgataacactgctgaaggctatgttcttaaaccgtgtgaacccaaatggttaccgaatgggacgcgtgtggcgatcaaatgcaagaactccaaattcagcgagaagaagaaaagtgacaaaccgatcaagacacaagtcccactgacggaaattgataagaatctgctggacgtattggcctgttatgtcactttaaaccgcgtgaacaacgtgatctctaagattggaacagtgacgccgaaagattttgagaaagtaatgtggctgactgttcaggatattctggaagaaacgtcacgtgagggtattgttctgacgacatcggacaatcctgacctcgtcaagaaagaacttattcgcatggtgcaggatgtattagaatcggcatggcgcgaactggtgtcg

SEQ ID NO: 508 - protein, 343 aa, synthetic construct
  REGION 1..343: note = variant of RNA ligase 2 from Escherichia phage RB69 (Bacteriophage RB69)
MHHHHHHGGSGMFKKYSSLENHYNSKFIEKLYANGLTDGVWVAREKIHGTNFSLIIERDNVTCAKRTGPIKPAETFYGYEIVLKKYDKAIKTVQKFMYTAGAVSYQVFGEFAGNGIWKGVDYGEKDFYVFDILINAESGDNTYLTDYEMQDFCNEFGFKMAPMLGRGTFDSLIMIPNDFDSVLMAYNATAKEDLVKANNCVFDANVIGDNTAEGYVLKPCEPKWLPNGTRVAIKCKNSKFSEKKKSDKPIKTQVPLTEIDKNLLDVLACYVTLNRVNNVISKIGTVTPKDFEKVMWLTVQDILEETSREGIVLTTSDNPDLVKKELIRMVQDVLESAWRELVS

SEQ ID NO: 509 - DNA, 1029 bp, synthetic construct
  misc_feature 1..1029: note = variant of RNA ligase 2 from Escherichia phage RB69 (Bacteriophage RB69)
  source 1..1029: mol_type = other DNA
atgcatcaccatcaccatcacggtggcagcggtatgtttaagaaatattctagtctggaaaaccattacaatagcaaattcattgagaaactctatgctaacggcttaactgatggtgtatgggttgcgcgcgaaaagatccacgggacgaacttttcgctgattatcgagcgtgataatgtaacatgcgccaaacgtacaggcccgattaagcctgcagaaaccttctacggttatgaaatcgtcctgaagaaatacgataaagcgattaagacggtgcagaaatttatgtataccgccggcgccgtttcctaccaagtgttcggagaatttgctggcaacggtatctggaaaggggtcgattatggcgagaaagacttctatgtgtttgatattctgatcaatgcggaatcaggagacaacacgtacctgactgattatgaaatgcaggacttctgtaatgaatttgggtttaagatggcaccaatgcttggtcgcggcacattcgatagcctgattatgattccgaacgatttcgattcggttctcatggcttacaatgcaacggcgaaagaggacctggtaaaagcgaacaactgcgtctttgatgccaatgtgatcggtgataacactgctgaaggctatgttcttaaaccgtgtgaacccaaatggttaccgaatgggacgcgtgtggcgatcaaatgcaagaactccaaattcagcgagaagaagaaaagtgacaaaccgatcaagacacaagtcccactgacggaaattgataagaatctgctggacgtattggcctgttatgtcactttaaaccgcgtgaacaacgtgatctctaagattggaacagtgacgccgaaagattttgagaaagtaatgtggctgactgttcaggatattctggaagaaacgtcacgtgagggtattgttctgacgacatcggacaatcctgacctcgtcaagaaagaacttgtccgcatggtgcaggatactttagaatcggcatggcgcgaactggtgtcg

SEQ ID NO: 510 - protein, 343 aa, synthetic construct
  REGION 1..343: note = variant of RNA ligase 2 from Escherichia phage RB69 (Bacteriophage RB69)
MHHHHHHGGSGMFKKYSSLENHYNSKFIEKLYANGLTDGVWVAREKIHGTNFSLIIERDNVTCAKRTGPIKPAETFYGYEIVLKKYDKAIKTVQKFMYTAGAVSYQVFGEFAGNGIWKGVDYGEKDFYVFDILINAESGDNTYLTDYEMQDFCNEFGFKMAPMLGRGTFDSLIMIPNDFDSVLMAYNATAKEDLVKANNCVFDANVIGDNTAEGYVLKPCEPKWLPNGTRVAIKCKNSKFSEKKKSDKPIKTQVPLTEIDKNLLDVLACYVTLNRVNNVISKIGTVTPKDFEKVMWLTVQDILEETSREGIVLTTSDNPDLVKKELVRMVQDTLESAWRELVS

SEQ ID NO: 511 - DNA, 1029 bp, synthetic construct
  misc_feature 1..1029: note = variant of RNA ligase 2 from Escherichia phage RB69 (Bacteriophage RB69)
  source 1..1029: mol_type = other DNA
atgcatcaccatcaccatcacggtggcagcggtatgtttaagaaatattctagtctggaaaaccattacaatagcaaattcattgagaaactctatgctaacggcttaactgatggtgtatgggttgcgcgcgaaaagatccacgggacgaacttttcgctgattatcgagcgtgataatgtaacatgcgccaaacgtacaggcccgattaagcctgcagaaaccttctacggttatgaaatcgtcctgaagaaatacgataaagcgattaagacggtgcagaaatttatgtataccgccggcgccgtttcctaccaagtgttcggagaatttgctggcaacggtatctggaaaggggtcgattatggcgagaaagacttctatgtgtttgatattctgatcaatgcggaatcaggagacaacacgtacctgactgattatgaaatgcaggacttctgtaatgaatttgggtttaagatggcaccaatgcttggtcgcggcacattcgatagcctgattatgattccgaacgatttcgattcggttctcatggcttacaatgcagtggcgaaagaggacctggtaaaagcgaacaactgcgtctttgatgccaatgtgatcggtgataacactgctgaaggctatgttcttaaaccgtgtgaacccaaatggttaccgaatgggacgcgtgtggcgatcaaatgcaagaactccaaattcagcgagaagaagaaaagtgacaaaccgatcaagacacaagtcccactgacggaaattgataagaatctgctggacgtattggcctgttatgtcactttaaaccgcgtgaacaacgtgatctctaagattggaacagtgacgccgaaagattttgagaaagtaatgtggctgactgttcaggatattctggaagaaacgtcacgtgagggtattgttctgacgacatcggacaatcctgacctcgtcaagaaagaacttgtccgcatggtgcaggatgtattagaatcggcatggcgcgaactggtgtcg

SEQ ID NO: 512 - protein, 343 aa, synthetic construct
  REGION 1..343: note = variant of RNA ligase 2 from Escherichia phage RB69 (Bacteriophage RB69)
MHHHHHHGGSGMFKKYSSLENHYNSKFIEKLYANGLTDGVWVAREKIHGTNFSLIIERDNVTCAKRTGPIKPAETFYGYEIVLKKYDKAIKTVQKFMYTAGAVSYQVFGEFAGNGIWKGVDYGEKDFYVFDILINAESGDNTYLTDYEMQDFCNEFGFKMAPMLGRGTFDSLIMIPNDFDSVLMAYNAVAKEDLVKANNCVFDANVIGDNTAEGYVLKPCEPKWLPNGTRVAIKCKNSKFSEKKKSDKPIKTQVPLTEIDKNLLDVLACYVTLNRVNNVISKIGTVTPKDFEKVMWLTVQDILEETSREGIVLTTSDNPDLVKKELVRMVQDVLESAWRELVS

SEQ ID NO: 513 - DNA, 1029 bp, synthetic construct
  misc_feature 1..1029: note = variant of RNA ligase 2 from Escherichia phage RB69 (Bacteriophage RB69)
  source 1..1029: mol_type = other DNA
atgcatcaccatcaccatcacggtggcagcggtatgtttaagaaatattctagtctggaaaaccattacaataagaaattcattgagaaactctatgctaacggcttaactgatggtgtatgggttgcgcgcgaaaagatccacgggacgaacttttcgctgattatcgagcgtgataatgtaacatgcgccaaacgtacaggcccgattaagcctgcagaaaccttctacggttatgaaatcgtcctgaagaaatacgataaagcgattaagacggtgcagaaatttatgtataccgccggcgccgtttcctaccaagtgttcggagaatttgctggcaacggtatctggaaaggggtcgattatggcgagaaagacttctatgtgtttgatattctgatcaatgcggaatcaggagacaacacgtacctgactgattatgaaatgcaggacttctgtaatgaatttgggtttaagatggcaccaatgcttggtcgcggcacattcgatagcctgattatgattccgaacgatttcgattcggttctcatggcttacaatgcaacggcgaaagaggacctggtaaaagcgaacaactgcgtctttgatgccaatgtgatcggtgataacactgctgaaggctatgttcttaaaccgtgtgaacccaaatggttaccgaatgggacgcgtgtggcgatcaaatgcaagaactccaaattcagcgagaagaagaaaagtgacaaaccgatcaagacacaagtcccactgacggaaattgataagaatctgctggacgtattggcctgttatgtcactttaaaccgcgtgaacaacgtgatctctaagattggaacagtgacgccgaaagattttgagaaagtaatgtggctgactgttcaggatattctggaagaaacgtcacgtgagggtattgttctgacgacatcggacaatcctgacctcgtcaagaaagaacttgtccgcatggtgcaggatgtattagaatcggcatggcgcgaactggtgtcg

SEQ ID NO: 514 - protein, 343 aa, synthetic construct
  REGION 1..343: note = variant of RNA ligase 2 from Escherichia phage RB69 (Bacteriophage RB69)
MHHHHHHGGSGMFKKYSSLENHYNKKFIEKLYANGLTDGVWVAREKIHGTNFSLIIERDNVTCAKRTGPIKPAETFYGYEIVLKKYDKAIKTVQKFMYTAGAVSYQVFGEFAGNGIWKGVDYGEKDFYVFDILINAESGDNTYLTDYEMQDFCNEFGFKMAPMLGRGTFDSLIMIPNDFDSVLMAYNATAKEDLVKANNCVFDANVIGDNTAEGYVLKPCEPKWLPNGTRVAIKCKNSKFSEKKKSDKPIKTQVPLTEIDKNLLDVLACYVTLNRVNNVISKIGTVTPKDFEKVMWLTVQDILEETSREGIVLTTSDNPDLVKKELVRMVQDVLESAWRELVS

SEQ ID NO: 515 - DNA, 1029 bp, synthetic construct
  misc_feature 1..1029: note = variant of RNA ligase 2 from Escherichia phage RB69 (Bacteriophage RB69)
  source 1..1029: mol_type = other DNA
atgcatcaccatcaccatcacggtggcagcggtatgtttaagaaatattctagtctggaaaaccattacaatagcaaattcattgagaaactctatgctaacggcttaactgatggtgtatgggttgcgcgcgaaaagatccacgggacgaacttttcgctgattatcgagcgtgataatgtaacatgcgccaaacgtacaggcccgattaagcctacggaaaccttctacggttatgaaatcgtcctgaagaaatacgataaagcgattaagacggtgcagaaatttatgtataccgccggcgccgtttcctaccaagtgttcggagaatttgctggcaacggtatctggaaaggggtcgattatggcgagaaagacttctatgtgtttgatattctgatcaatgcggaatcaggagacaacacgtacctgactgattatgaaatgcaggacttctgtaatgaatttgggtttaagatggcaccaatgcttggtcgcggcacattcgatagcctgattatgattccgaacgatttcgattcggttctcatggcttacaatgcaacggcgaaagaggacctggtaaaagcgaacaactgcgtctttgatgccaatgtgatcggtgataacactgctgaaggctatgttcttaaaccgtgtgaacccaaatggttaccgaatgggacgcgtgtggcgatcaaatgcaagaactccaaattcagcgagaagaagaaaagtgacaaaccgatcaagacacaagtcccactgacggaaattgataagaatctgctggacgtattggcctgttatgtcactttaaaccgcgtgaacaacgtgatctctaagattggaacagtgacgccgaaagattttgagaaagtaatgtggctgactgttcaggatattctggaagaaacgtcacgtgagggtattgttctgacgacatcggacaatcctgacctcgtcaagaaagaacttgtccgcatggtgcaggatgtattagaatcggcatggcgcgaactggtgtcg

SEQ ID NO: 516 - protein, 343 aa, synthetic construct
  REGION 1..343: note = variant of RNA ligase 2 from Escherichia phage RB69 (Bacteriophage RB69)
MHHHHHHGGSGMFKKYSSLENHYNSKFIEKLYANGLTDGVWVAREKIHGTNFSLIIERDNVTCAKRTGPIKPTETFYGYEIVLKKYDKAIKTVQKFMYTAGAVSYQVFGEFAGNGIWKGVDYGEKDFYVFDILINAESGDNTYLTDYEMQDFCNEFGFKMAPMLGRGTFDSLIMIPNDFDSVLMAYNATAKEDLVKANNCVFDANVIGDNTAEGYVLKPCEPKWLPNGTRVAIKCKNSKFSEKKKSDKPIKTQVPLTEIDKNLLDVLACYVTLNRVNNVISKIGTVTPKDFEKVMWLTVQDILEETSREGIVLTTSDNPDLVKKELVRMVQDVLESAWRELVS

SEQ ID NO: 517 - DNA, 1029 bp, synthetic construct
  misc_feature 1..1029: note = variant of RNA ligase 2 from Escherichia phage RB69 (Bacteriophage RB69)
  source 1..1029: mol_type = other DNA
atgcatcaccatcaccatcacggtggcagcggtatgtttaagaaatattctagtctggaaaaccattacaatagcaaattcattgagaaactctatgctaacggcttaactgatggtgtatgggttgcgcgcgaaaagatccacgggacgaacttttcgctgattatcgagcgtgataatgtaacatgcgccaaacgtacaggcccgattaagcctgcagaaaccttctacggttatgaaatcgtcctgaagaaatacgataaagcgattaagacggtgcagaaatttatgtataccgccggcgccgtttcctaccaagtgttcggagaatttgctggcaacggtatctggaaaggggtcgattatggcgagaaagacttctatgtgtttgatattctgatcaatgcggaatcaggagacaacacgtacctgactgattatgaaatgcaggacttctgtaatgaatttgggtttaagatggcaccaatgcttggtcgcggcacattcgatagcctgattatgattccgaacgatttcgattcggttctcatggcttacaatgcaacggcgaaagaggacctggtaaaagcgaacaactgcgtctttgatgccaatgtgatcggtgataacactgctgaaggctatgttcttaaaccgtgtgaacccaaatggttaccgaatgggacgcgtgtggcgatcaaatgcaagaactccaaattcagcgagaagaagaaaagtgacaaaccgatcaagacacaagtcccactgacggaaattgataagaatctgctggacgtattggcctgttatgtcactttaaaccgcgtgaacaacgtgatctctaagattggaacagtgacgccgaaagattttgagaaagtaatgtggctgactgttcaggatattctggaagaaacgtcacgtgagggtattgttctgacgacatcggacaatcctgacctcgtcaagaaagaacttgtccgcatggtgcaggatagtttagaatcggcatggcgcgaactggtgtcg

SEQ ID NO: 518 - protein, 343 aa, synthetic construct
  REGION 1..343: note = variant of RNA ligase 2 from Escherichia phage RB69 (Bacteriophage RB69)
MHHHHHHGGSGMFKKYSSLENHYNSKFIEKLYANGLTDGVWVAREKIHGTNFSLIIERDNVTCAKRTGPIKPAETFYGYEIVLKKYDKAIKTVQKFMYTAGAVSYQVFGEFAGNGIWKGVDYGEKDFYVFDILINAESGDNTYLTDYEMQDFCNEFGFKMAPMLGRGTFDSLIMIPNDFDSVLMAYNATAKEDLVKANNCVFDANVIGDNTAEGYVLKPCEPKWLPNGTRVAIKCKNSKFSEKKKSDKPIKTQVPLTEIDKNLLDVLACYVTLNRVNNVISKIGTVTPKDFEKVMWLTVQDILEETSREGIVLTTSDNPDLVKKELVRMVQDSLESAWRELVS

SEQ ID NO: 519 - DNA, 1029 bp, synthetic construct
  misc_feature 1..1029: note = variant of RNA ligase 2 from Escherichia phage RB69 (Bacteriophage RB69)
  source 1..1029: mol_type = other DNA
atgcatcaccatcaccatcacggtggcagcggtatgtttaagaaatattctagtctggaaaaccattacaatagcaaattcattgagaaactctatgctaacggcttaactgatggtgtatgggttgcgcgcgaaaagatccacgggacgaacttttcgctgattatcgagcgtgataatgtaacatgcgccaaacgtacaggcccgattaagcctgcagaaaccttctacggttatgaaatcgtcctgaagaaatacgataaagcgattaagacggtgcagaaatttatgtctaccgccggcgccgtttcctaccaagtgttcggagaatttgctggcaacggtatctggaaaggggtcgattatggcgagaaagacttctatgtgtttgatattctgatcaatgcggaatcaggagacaacacgtacctgactgattatgaaatgcaggacttctgtaatgaatttgggtttaagatggcaccaatgcttggtcgcggcacattcgatagcctgattatgattccgaacgatttcgattcggttctcatggcttacaatgcaacggcgaaagaggacctggtaaaagcgaacaactgcgtctttgatgccaatgtgatcggtgataacactgctgaaggctatgttcttaaaccgtgtgaacccaaatggttaccgaatgggacgcgtgtggcgatcaaatgcaagaactccaaattcagcgagaagaagaaaagtgacaaaccgatcaagacacaagtcccactgacggaaattgataagaatctgctggacgtattggcctgttatgtcactttaaaccgcgtgaacaacgtgatctctaagattggaacagtgacgccgaaagattttgagaaagtaatgtggctgactgttcaggatattctggaagaaacgtcacgtgagggtattgttctgacgacatcggacaatcctgacctcgtcaagaaagaacttgtccgcatggtgcaggatgtattagaatcggcatggcgcgaactggtgtcg

SEQ ID NO: 520 - protein, 343 aa, synthetic construct
  REGION 1..343: note = variant of RNA ligase 2 from Escherichia phage RB69 (Bacteriophage RB69)
MHHHHHHGGSGMFKKYSSLENHYNSKFIEKLYANGLTDGVWVAREKIHGTNFSLIIERDNVTCAKRTGPIKPAETFYGYEIVLKKYDKAIKTVQKFMSTAGAVSYQVFGEFAGNGIWKGVDYGEKDFYVFDILINAESGDNTYLTDYEMQDFCNEFGFKMAPMLGRGTFDSLIMIPNDFDSVLMAYNATAKEDLVKANNCVFDANVIGDNTAEGYVLKPCEPKWLPNGTRVAIKCKNSKFSEKKKSDKPIKTQVPLTEIDKNLLDVLACYVTLNRVNNVISKIGTVTPKDFEKVMWLTVQDILEETSREGIVLTTSDNPDLVKKELVRMVQDVLESAWRELVS

SEQ ID NO: 521 - DNA, 1029 bp, synthetic construct
  misc_feature 1..1029: note = variant of RNA ligase 2 from Escherichia phage RB69 (Bacteriophage RB69)
  source 1..1029: mol_type = other DNA
atgcatcaccatcaccatcacggtggcagcggtatgtttaagaaatattctagtctggaaaaccattacaatagcaaattcattgagaaactctatgctaacggcttaactgatggtgtatgggttgcgcgcgaaaagatccacgggacgaacttttcgctgattatcgagcgtgataatgtaacatgcgccaaacgtacaggcccgattaagcctgcagaaaccttctacggttatgaaatcgtcctgaagaaatacgataaagcgattaagacggtgcagaaatttatgtataccgccggcgccgtttcctaccaagtgttcggagaatttgctggcaacggtatctggaaaggggtcgattatggcgagaaagacttctatgtgtttgatattctgatcaatgcggaatcaggagacaacacgtacctgactgattatgaaatgcaggacttctgtaatgaatttgggtttaagatggcaccaatgcttggtcgcggcacattcgatagcctgattatgattccgaacgatttcgattcggttctcatggcttacaatgcaacggcgaaagaggacctggtaaaagcgaacaactgcgtctttgatgccaatgtgatcggtgataacactgctgaaggctatgttcttaaaccgtgtgaacccaaatggttaccgaatgggacgcgtgtggcgatcaaatgcaagaactccaaattcagcgagaagaagaaaagtgacaaaccgatcaagacacaagtcccactgacggaaattgataagaatctgctggacgtattggcctgttatgtcactttaaaccgcgtgaacaacgtgatctctaagattggaacagtgacgccgaaagattttgagaaagtaatgtggctgactgttcaggatattctggaagaaacgtcacgtgagggtattgttctgacgacatcggacaatcctgacctcgtcaagaaagaacttgtccgcatggtgcaggatgtattactgtcggcatggcgcgaactggtgtcg

SEQ ID NO: 522 - protein, 343 aa, synthetic construct
  REGION 1..343: note = variant of RNA ligase 2 from Escherichia phage RB69 (Bacteriophage RB69)
MHHHHHHGGSGMFKKYSSLENHYNSKFIEKLYANGLTDGVWVAREKIHGTNFSLIIERDNVTCAKRTGPIKPAETFYGYEIVLKKYDKAIKTVQKFMYTAGAVSYQVFGEFAGNGIWKGVDYGEKDFYVFDILINAESGDNTYLTDYEMQDFCNEFGFKMAPMLGRGTFDSLIMIPNDFDSVLMAYNATAKEDLVKANNCVFDANVIGDNTAEGYVLKPCEPKWLPNGTRVAIKCKNSKFSEKKKSDKPIKTQVPLTEIDKNLLDVLACYVTLNRVNNVISKIGTVTPKDFEKVMWLTVQDILEETSREGIVLTTSDNPDLVKKELVRMVQDVLLSAWRELVS

SEQ ID NO: 523 - DNA, 1029 bp, synthetic construct
  misc_feature 1..1029: note = variant of RNA ligase 2 from Escherichia phage RB69 (Bacteriophage RB69)
  source 1..1029: mol_type = other DNA
atgcatcaccatcaccatcacggtggcagcggtatgtttaagaaatattctagtctggaaaaccattacaatagcaaattcattgagaaactctatgctaacggcttaactgatggtgtatgggttgcgcgcgaaaagatccacgggacgaacttttcgctgattatcgagcgtgataatgtaacatgcgccaaacgtacaggcccgattaagcctgcagaaaccttctacggttatgaaatcgtcctgaagaaatacgataaagcgattaagacggtgcagaaatttatgtataccgccggcgccgtttcctaccaagtgttcggagaatttgctggcaacggtatctggaaaggggtcgattatggcgagaaagacttctatgtgtttgatattctgatcaatgcggaatcaggagacaacacgtacctgactgattatgaaatgcaggacttctgtaatgaatttgggtttaagatggcaccaatgcttggtcgcggcacattcgatagcctgattatgattccgaacgatttcgattcggttctcatggcttacaatgcaacggcgaaagaggacctggtaaaagcgaacaactgcgtctttgatgccaatgtgatcggtgataacactgctgaaggctatgttcttaaaccgtgtgaacccaaatggttaccgaatgggacgcgtgtggcgatcaaatgcaagaactccaaattcagcgagaagaagaaaagtgacaaaccgatcaagacacaagtcccactgacggaaattgataagaatctgctggacgtattggcctgttatgtcactttaaaccgcgtgaacaacgtgatctctaagattggaacagtgacgccgaaagattttgagaaagtaatgtggctgactgttcaggatattctggaagaaacgtcacgtgagggtattgttctgacgacatcggacaatcctgacctcgtcaagaaagaacttcggcgcatggtgcaggatgtattagaatcggcatggcgcgaactggtgtcg

SEQ ID NO: 524 - protein, 343 aa, synthetic construct
  REGION 1..343: note = variant of RNA ligase 2 from Escherichia phage RB69 (Bacteriophage RB69)
MHHHHHHGGSGMFKKYSSLENHYNSKFIEKLYANGLTDGVWVAREKIHGTNFSLIIERDNVTCAKRTGPIKPAETFYGYEIVLKKYDKAIKTVQKFMYTAGAVSYQVFGEFAGNGIWKGVDYGEKDFYVFDILINAESGDNTYLTDYEMQDFCNEFGFKMAPMLGRGTFDSLIMIPNDFDSVLMAYNATAKEDLVKANNCVFDANVIGDNTAEGYVLKPCEPKWLPNGTRVAIKCKNSKFSEKKKSDKPIKTQVPLTEIDKNLLDVLACYVTLNRVNNVISKIGTVTPKDFEKVMWLTVQDILEETSREGIVLTTSDNPDLVKKELRRMVQDVLESAWRELVS

SEQ ID NO: 525 - DNA, 1029 bp, synthetic construct
  misc_feature 1..1029: note = variant of RNA ligase 2 from Escherichia phage RB69 (Bacteriophage RB69)
  source 1..1029: mol_type = other DNA
atgcatcaccatcaccatcacggtggcagcggtatgtttaagaaatattctagtctggaaaaccattacaatagcaaattcattgagaaactctatgctaacggcttaactgatggtgtatgggttgcgcgcgaaaagatccacgggacgaacttttcgctgattatcgagcgtgataatgtaacatgcgccaaacgtacaggcccgattaagcctgcagaaaccttctacggttatgaaatcgtcctgaagaaatacgataaagcgattaagacggtgcaggagtttatgtataccgccggcgccgtttcctaccaagtgttcggagaatttgctggcaacggtatctggaaaggggtcgattatggcgagaaagacttctatgtgtttgatattctgatcaatgcggaatcaggagacaacacgtacctgactgattatgaaatgcaggacttctgtaatgaatttgggtttaagatggcaccaatgcttggtcgcggcacattcgatagcctgattatgattccgaacgatttcgattcggttctcatggcttacaatgcaacggcgaaagaggacctggtaaaagcgaacaactgcgtctttgatgccaatgtgatcggtgataacactgctgaaggctatgttcttaaaccgtgtgaacccaaatggttaccgaatgggacgcgtgtggcgatcaaatgcaagaactccaaattcagcgagaagaagaaaagtgacaaaccgatcaagacacaagtcccactgacggaaattgataagaatctgctggacgtattggcctgttatgtcactttaaaccgcgtgaacaacgtgatctctaagattggaacagtgacgccgaaagattttgagaaagtaatgtggctgactgttcaggatattctggaagaaacgtcacgtgagggtattgttctgacgacatcggacaatcctgacctcgtcaagaaagaacttgtccgcatggtgcaggatgtattagaatcggcatggcgcgaactggtgtcg

SEQ ID NO: 526 - protein, 343 aa, synthetic construct
  REGION 1..343: note = variant of RNA ligase 2 from Escherichia phage RB69 (Bacteriophage RB69)
MHHHHHHGGSGMFKKYSSLENHYNSKFIEKLYANGLTDGVWVAREKIHGTNFSLIIERDNVTCAKRTGPIKPAETFYGYEIVLKKYDKAIKTVQEFMYTAGAVSYQVFGEFAGNGIWKGVDYGEKDFYVFDILINAESGDNTYLTDYEMQDFCNEFGFKMAPMLGRGTFDSLIMIPNDFDSVLMAYNATAKEDLVKANNCVFDANVIGDNTAEGYVLKPCEPKWLPNGTRVAIKCKNSKFSEKKKSDKPIKTQVPLTEIDKNLLDVLACYVTLNRVNNVISKIGTVTPKDFEKVMWLTVQDILEETSREGIVLTTSDNPDLVKKELVRMVQDVLESAWRELVS

SEQ ID NO: 527 - DNA, 1029 bp, synthetic construct
  misc_feature 1..1029: note = variant of RNA ligase 2 from Escherichia phage RB69 (Bacteriophage RB69)
  source 1..1029: mol_type = other DNA
atgcatcaccatcaccatcacggtggcagcggtatgtttaagaaatattctagtctggaaaaccattacaatagcaaattcattgagaaactctatgctaacggcttaactgatggtgtatgggttgcgcgcgaaaagatccacgggacgaacttttcgctgattatcgagcgtgataatgtaacatgcgccaaacgtacaggcccgattaagcctgcagaaaccttctacggttatgaaatcgtcctgaagaaatacgataaagcgattaagacggtgcagaaatttatgtataccgccggcgccgtttcctaccaagtgttcggagaatttgctggcaacggtatctggaaaggggtcgattatggcgagaaagacttctatgtgtttgatattctgatcaatgcggaatcaggagacaacacgtacctgactgattatgaaatgcaggacttctgtaatgaatttgggtttaagatggcaccaatgcttggtcgcggcacattcgatagcctgattatgattccgaacgatttcgattcggttctcatggcttacaattcgacggcgaaagaggacctggtaaaagcgaacaactgcgtctttgatgccaatgtgatcggtgataacactgctgaaggctatgttcttaaaccgtgtgaacccaaatggttaccgaatgggacgcgtgtggcgatcaaatgcaagaactccaaattcagcgagaagaagaaaagtgacaaaccgatcaagacacaagtcccactgacggaaattgataagaatctgctggacgtattggcctgttatgtcactttaaaccgcgtgaacaacgtgatctctaagattggaacagtgacgccgaaagattttgagaaagtaatgtggctgactgttcaggatattctggaagaaacgtcacgtgagggtattgttctgacgacatcggacaatcctgacctcgtcaagaaagaacttgtccgcatggtgcaggatgtattagaatcggcatggcgcgaactggtgtcg

SEQ ID NO: 528 - protein, 343 aa, synthetic construct
  REGION 1..343: note = variant of RNA ligase 2 from Escherichia phage RB69 (Bacteriophage RB69)
MHHHHHHGGSGMFKKYSSLENHYNSKFIEKLYANGLTDGVWVAREKIHGTNFSLIIERDNVTCAKRTGPIKPAETFYGYEIVLKKYDKAIKTVQKFMYTAGAVSYQVFGEFAGNGIWKGVDYGEKDFYVFDILINAESGDNTYLTDYEMQDFCNEFGFKMAPMLGRGTFDSLIMIPNDFDSVLMAYNSTAKEDLVKANNCVFDANVIGDNTAEGYVLKPCEPKWLPNGTRVAIKCKNSKFSEKKKSDKPIKTQVPLTEIDKNLLDVLACYVTLNRVNNVISKIGTVTPKDFEKVMWLTVQDILEETSREGIVLTTSDNPDLVKKELVRMVQDVLESAWRELVS

SEQ ID NO: 529 - DNA, 1029 bp, synthetic construct
  misc_feature 1..1029: note = variant of RNA ligase 2 from Escherichia phage RB69 (Bacteriophage RB69)
  source 1..1029: mol_type = other DNA
atgcatcaccatcaccatcacggtggcagcggtatgtttaagaaatattctagtctggaaaaccattacaatagcaaattcattgagaaactctatgctaacggcttaactgatggtgtatgggttgcgcgcgaaaagatccacgggacgaacttttcgctgattatcgagcgtgataatgtaacatgcgccaaacgtacaggcccgattaagcctgcagaaaccttctacggttatgaaatcgtcctgaagaaatacgataaagcgattaagacggtgcagaaatttatggagaccgccggcgccgtttcctaccaagtgttcggagaatttgctggcaacggtatctggaaaggggtcgattatggcgagaaagacttctatgtgtttgatattctgatcaatgcggaatcaggagacaacacgtacctgactgattatgaaatgcaggacttctgtaatgaatttgggtttaagatggcaccaatgcttggtcgcggcacattcgatagcctgattatgattccgaacgatttcgattcggttctcatggcttacaatgcaacggcgaaagaggacctggtaaaagcgaacaactgcgtctttgatgccaatgtgatcggtgataacactgctgaaggctatgttcttaaaccgtgtgaacccaaatggttaccgaatgggacgcgtgtggcgatcaaatgcaagaactccaaattcagcgagaagaagaaaagtgacaaaccgatcaagacacaagtcccactgacggaaattgataagaatctgctggacgtattggcctgttatgtcactttaaaccgcgtgaacaacgtgatctctaagattggaacagtgacgccgaaagattttgagaaagtaatgtggctgactgttcaggatattctggaagaaacgtcacgtgagggtattgttctgacgacatcggacaatcctgacctcgtcaagaaagaacttgtccgcatggtgcaggatgtattagaatcggcatggcgcgaactggtgtcg

SEQ ID NO: 530 - protein, 343 aa, synthetic construct
  REGION 1..343: note = variant of RNA ligase 2 from Escherichia phage RB69 (Bacteriophage RB69)
MHHHHHHGGSGMFKKYSSLENHYNSKFIEKLYANGLTDGVWVAREKIHGTNFSLIIERDNVTCAKRTGPIKPAETFYGYEIVLKKYDKAIKTVQKFMETAGAVSYQVFGEFAGNGIWKGVDYGEKDFYVFDILINAESGDNTYLTDYEMQDFCNEFGFKMAPMLGRGTFDSLIMIPNDFDSVLMAYNATAKEDLVKANNCVFDANVIGDNTAEGYVLKPCEPKWLPNGTRVAIKCKNSKFSEKKKSDKPIKTQVPLTEIDKNLLDVLACYVTLNRVNNVISKIGTVTPKDFEKVMWLTVQDILEETSREGIVLTTSDNPDLVKKELVRMVQDVLESAWRELVS

SEQ ID NO: 531 - DNA, 1029 bp, synthetic construct
  misc_feature 1..1029: note = variant of RNA ligase 2 from Escherichia phage RB69 (Bacteriophage RB69)
  source 1..1029: mol_type = other DNA
atgcatcaccatcaccatcacggtggcagcggtatgtttaagaaatattctagtctggaaaaccattacaatagcaaattcattgagaaactctatgctaacggcttaactgatggtgtatgggttgcgcgcgaaaagatccacgggacgaacttgtcgctgattatcgagcgtgataatgtaacatgcgccaaacgtacaggcccgattaagcctgcagaaaccttctacggttatgaaatcgtcctgaagaaatacgataaagcgattaagacggtgcagaaatttatgtataccgccggcgccgtttcctaccaagtgttcggagaatttgctggcaacggtatctggaaaggggtcgattatggcgagaaagacttctatgtgtttgatattctgatcaatgcggaatcaggagacaacacgtacctgactgattatgaaatgcaggacttctgtaatgaatttgggtttaagatggcaccaatgcttggtcgcggcacattcgatagcctgattatgattccgaacgatttcgattcggttctcatggcttacaatgcaacggcgaaagaggacctggtaaaagcgaacaactgcgtctttgatgccaatgtgatcggtgataacactgctgaaggctatgttcttaaaccgtgtgaacccaaatggttaccgaatgggacgcgtgtggcgatcaaatgcaagaactccaaattcagcgagaagaagaaaagtgacaaaccgatcaagacacaagtcccactgacggaaattgataagaatctgctggacgtattggcctgttatgtcactttaaaccgcgtgaacaacgtgatctctaagattggaacagtgacgccgaaagattttgagaaagtaatgtggctgactgttcaggatattctggaagaaacgtcacgtgagggtattgttctgacgacatcggacaatcctgacctcgtcaagaaagaacttgtccgcatggtgcaggatgtattagaatcggcatggcgcgaactggtgtcg

SEQ ID NO: 532 - protein, 343 aa, synthetic construct
  REGION 1..343: note = variant of RNA ligase 2 from Escherichia phage RB69 (Bacteriophage RB69)
MHHHHHHGGSGMFKKYSSLENHYNSKFIEKLYANGLTDGVWVAREKIHGTNLSLIIERDNVTCAKRTGPIKPAETFYGYEIVLKKYDKAIKTVQKFMYTAGAVSYQVFGEFAGNGIWKGVDYGEKDFYVFDILINAESGDNTYLTDYEMQDFCNEFGFKMAPMLGRGTFDSLIMIPNDFDSVLMAYNATAKEDLVKANNCVFDANVIGDNTAEGYVLKPCEPKWLPNGTRVAIKCKNSKFSEKKKSDKPIKTQVPLTEIDKNLLDVLACYVTLNRVNNVISKIGTVTPKDFEKVMWLTVQDILEETSREGIVLTTSDNPDLVKKELVRMVQDVLESAWRELVS

SEQ ID NO: 533 - DNA, 1029 bp, synthetic construct
  misc_feature 1..1029: note = variant of RNA ligase 2 from Escherichia phage RB69 (Bacteriophage RB69)
  source 1..1029: mol_type = other DNA
atgcatcaccatcaccatcacggtggcagcggtatgtttaagaaatattctagtctggaaaaccattacaatagcaaattcattgagaaactctatgctaacggcttaactgatggtgtatgggttgcgcgcgaaaagatccacgggacgaacttttcgctgattatcgagcgtgataatgtaacatgcgccaaacgtacaggcccgattaagcctgcagaaaccttctacggttatgaaatcgtcctgaagaaatacgataaagcgattaagacggtgcagaaatttatgtataccgccggcgccgtttcctaccaagtgttcggagaatttgctggcaacggtatctggaaaggggtcgattatggcgagaaagacttctatgtgtttgatattctgatcaatgcggaatcaggagacaacacgtacctgactgattatgaaatgcaggacttctgtaatgaatttgggtttaagatggcaccaatgcttggtcgcggcacattcgatagcctgattatgattccgaacgatttcgattcggttctcatggcttacaatgcaacggcgaaagaggacctggtaaaagcgaacaactgcgtctttgatgccaatgtgatcggtgataacactgctgaaggctatgttcttaaaccgtgtgaacccaaatggttaccgaatgggacgcgtgtggcgatcaaatgcaagaactccaaattcagcgagaagaagaaaagtgacaaaccgatcaagacacaagtcccactgacggaaattgataagaatctgctggacgtattggcctgttatgtcactttaaaccgcgtgaacaacgtgatctctaagattggaacagtgacgccgaaagattttgagaaagtaatgtggctgactgttcaggatattctggaagaaacgtcacgtgagggtattgttctgacgacatcggacaatcctgacctcgtcaagaaagaacttgtccgcatggtgcaggatgtattaaagtcggcatggcgcgaactggtgtcg

SEQ ID NO: 534 - protein, 343 aa, synthetic construct
  REGION 1..343: note = variant of RNA ligase 2 from Escherichia phage RB69 (Bacteriophage RB69)
MHHHHHHGGSGMFKKYSSLENHYNSKFIEKLYANGLTDGVWVAREKIHGTNFSLIIERDNVTCAKRTGPIKPAETFYGYEIVLKKYDKAIKTVQKFMYTAGAVSYQVFGEFAGNGIWKGVDYGEKDFYVFDILINAESGDNTYLTDYEMQDFCNEFGFKMAPMLGRGTFDSLIMIPNDFDSVLMAYNATAKEDLVKANNCVFDANVIGDNTAEGYVLKPCEPKWLPNGTRVAIKCKNSKFSEKKKSDKPIKTQVPLTEIDKNLLDVLACYVTLNRVNNVISKIGTVTPKDFEKVMWLTVQDILEETSREGIVLTTSDNPDLVKKELVRMVQDVLKSAWRELVS

SEQ ID NO: 535 - DNA, 1029 bp, synthetic construct
  misc_feature 1..1029: note = variant of RNA ligase 2 from Escherichia phage RB69 (Bacteriophage RB69)
  source 1..1029: mol_type = other DNA
atgcatcaccatcaccatcacggtggcagcggtatgtttaagaaatattctagtctggaaaaccattacaatagcaaattcattgagaaactctatgctaacggcttaactgatggtgtatgggttgcgcgcgaaaagatccacgggacgaacttttcgctgattatcgagcgtgataatgtaacatgcgccaaacgtacaggcccgattaagcctgcagaaaccttctacggttatgaaatcgtcctgaagaaatacgataaagcgattaagacggtgcagaaatctatgtataccgccggcgccgtttcctaccaagtgttcggagaatttgctggcaacggtatctggaaaggggtcgattatggcgagaaagacttctatgtgtttgatattctgatcaatgcggaatcaggagacaacacgtacctgactgattatgaaatgcaggacttctgtaatgaatgtgggtttaagatggcaccaatgcttggtcgcggcacattcgatagcctgattatgattccgaacgatttcgattcggttctcatggcttacaatgcagtggcgaaagaggacctggtaaaagcgaacaactgcgtctttgatgccaatgtgatcggtgataacactgctgaaggctatgttcttaaaccgtgtgaacccaaatggttaccgaatgggacgcgtgtggcgatcaaatgcaagaactccaaattcagcgagaagaagaaaagtgacaaaccgatcaagacacaagtcccactgacggaaattgataagaatctgctggacgtattggcctgttatgtcactttaaaccgcgtgaacaacgtgatctctaagattggaacagtgacgccgaaagattttgagaaagtaatgtggctgactgttcaggatattctggaagaaacgtcacgtgagggtattgttctgacgacatcggacaatcctgacctcgtcaagaaagaacttgtccgcatggtgcaggatgtgttaaaatcggcatggcgcgaactggtgtcg

SEQ ID NO: 536 - protein, 343 aa, synthetic construct
  REGION 1..343: note = variant of RNA ligase 2 from Escherichia phage RB69 (Bacteriophage RB69)
MHHHHHHGGSGMFKKYSSLENHYNSKFIEKLYANGLTDGVWVAREKIHGTNFSLIIERDNVTCAKRTGPIKPAETFYGYEIVLKKYDKAIKTVQKSMYTAGAVSYQVFGEFAGNGIWKGVDYGEKDFYVFDILINAESGDNTYLTDYEMQDFCNECGFKMAPMLGRGTFDSLIMIPNDFDSVLMAYNAVAKEDLVKANNCVFDANVIGDNTAEGYVLKPCEPKWLPNGTRVAIKCKNSKFSEKKKSDKPIKTQVPLTEIDKNLLDVLACYVTLNRVNNVISKIGTVTPKDFEKVMWLTVQDILEETSREGIVLTTSDNPDLVKKELVRMVQDVLKSAWRELVS

SEQ ID NO: 537 - DNA, 1029 bp, synthetic construct
  misc_feature 1..1029: note = variant of RNA ligase 2 from Escherichia phage RB69 (Bacteriophage RB69)
  source 1..1029: mol_type = other DNA
atgcatcaccatcaccatcacggtggcagcggtatgtttaagaaatattctagtctggaaaaccattacaatagcaaattcattgagaaactctatgctaacggcttaactgatggtgtatgggttgcgcgcgaaaagatccacgggacgaacttttcgctgattatcgagcgtgataatgtaacatgcgccaaacgtacaggcccgattaagcctaccgaaaccttctacggttatgaaatcgtcctgaagaaatacgataaagcgattaagacggtgcagaaatctatggaaaccgccggcgccgtttcctaccaagtgttcggagaatttgctggcaacggtatctggaaaggggtcgattatggcgagaaagacttctatgtgtttgatattctgatcaatgcggaatcaggagacaacacgtacctgactgattatgaaatgcaggacttctgtaatgaatttgggtttaagatggcaccaatgcttggtcgcggcacattcgatagcctgattatgattccgaacgatttcgattcggttctcatggcttacaatgcactggcgaaagaggacctggtaaaagcgaacaactgcgtctttgatgccaatgtgatcggtgataacactgctgaaggctatgttcttaaaccgtgtgaacccaaatggttaccgaatgggacgcgtgtggcgatcaaatgcaagaactccaaattcagcgagaagaagaaaagtgacaaaccgatcaagacacaagtcccactgacggaaattgataagaatctgctggacgtattggcctgttatgtcactttaaaccgcgtgaacaacgtgatctctaagattggaacagtgacgccgaaagattttgagaaagtaatgtggctgactgttcaggatattctggaagaaacgtcacgtgagggtattgttctgacgacatcggacaatcctgacctcgtcaagaaagaacttgttcgcatggtgcaggatgtgttaaaatcggcatggcgcgaactggtgtcg

SEQ ID NO: 538 - protein, 343 aa, synthetic construct
  REGION 1..343: note = variant of RNA ligase 2 from Escherichia phage RB69 (Bacteriophage RB69)
MHHHHHHGGSGMFKKYSSLENHYNSKFIEKLYANGLTDGVWVAREKIHGTNFSLIIERDNVTCAKRTGPIKPTETFYGYEIVLKKYDKAIKTVQKSMETAGAVSYQVFGEFAGNGIWKGVDYGEKDFYVFDILINAESGDNTYLTDYEMQDFCNEFGFKMAPMLGRGTFDSLIMIPNDFDSVLMAYNALAKEDLVKANNCVFDANVIGDNTAEGYVLKPCEPKWLPNGTRVAIKCKNSKFSEKKKSDKPIKTQVPLTEIDKNLLDVLACYVTLNRVNNVISKIGTVTPKDFEKVMWLTVQDILEETSREGIVLTTSDNPDLVKKELVRMVQDVLKSAWRELVS

SEQ ID NO: 539 - DNA, 1029 bp, synthetic construct
  misc_feature 1..1029: note = variant of RNA ligase 2 from Escherichia phage RB69 (Bacteriophage RB69)
  source 1..1029: mol_type = other DNA
atgcatcaccatcaccatcacggtggcagcggtatgtttaagaaatattctagtctggaaaaccattacaatagcaaattcattgagaaactctatgctaacggcttaactgatggtgtatgggttgcgcgcgaaaagatccacgggacgaacttttcgctgattatcgagcgtgataatgtaacatgcgccaaacgtacaggcccgattaagcctaccgaaaccttctacggttatgaaatcgtcctgaagaaatacgataaagcgattaagacggtgcagaaatttatgtctaccgccggcgccgtttcctaccaagtgttcggagaatttgctggcaacggtatctggaaaggggtcgattatggcgagaaagacttctatgtgtttgatattctgatcaatgcggaatcaggagacaacacgtacctgactgattatgaaatgcaggacttctgtaatgaatttgggtttaagatggcaccaatgcttggtcgcggcacattcgatagcctgattatgattccgctggatttcgattcggttctcatggcttacaatgcagtggcgaaagaggacctggtaaaagcgaacaactgcgtctttgatgccaatgtgatcggtgataacactgctgaaggctatgttcttaaaccgtgtgaacccaaatggttaccgaatgggacgcgtgtggcgatcaaatgcaagaactccaaattcagcgagaagaagaaaagtgacaaaccgatcaagacacaagtcccactgacggaaattgataagaatctgctggacgtattggcctgttatgtcactttaaaccgcgtgaacaacgtgatctctaagattggaacagtgacgccgaaagattttgagaaagtaatgtggctgactgttcaggatattctggaagaaacgtcacgtgagggtattgttctgacgacatcggacaatcctgacctcgtcaagaaagaacttgtccgcatggtgcaggatgtattagaatcggcatggcgcgaactggtgtcg

SEQ ID NO: 540 - protein, 343 aa, synthetic construct
  REGION 1..343: note = variant of RNA ligase 2 from Escherichia phage RB69 (Bacteriophage RB69)
MHHHHHHGGSGMFKKYSSLENHYNSKFIEKLYANGLTDGVWVAREKIHGTNFSLIIERDNVTCAKRTGPIKPTETFYGYEIVLKKYDKAIKTVQKFMSTAGAVSYQVFGEFAGNGIWKGVDYGEKDFYVFDILINAESGDNTYLTDYEMQDFCNEFGFKMAPMLGRGTFDSLIMIPLDFDSVLMAYNAVAKEDLVKANNCVFDANVIGDNTAEGYVLKPCEPKWLPNGTRVAIKCKNSKFSEKKKSDKPIKTQVPLTEIDKNLLDVLACYVTLNRVNNVISKIGTVTPKDFEKVMWLTVQDILEETSREGIVLTTSDNPDLVKKELVRMVQDVLESAWRELVS

SEQ ID NO: 541 - DNA, 1029 bp, synthetic construct
  misc_feature 1..1029: note = variant of RNA ligase 2 from Escherichia phage RB69 (Bacteriophage RB69)
  source 1..1029: mol_type = other DNA
atgcatcaccatcaccatcacggtggcagcggtatgtttaagaaatattctagtctggaaaaccattacaatagcaaattcattgagaaactctatgctaacggcttaactgatggtgtatgggttgcgcgcgaaaagatccacgggacgaacttttcgctgattatcgagcgtgataatgtaacatgcgccaaacgtacaggcccgattaagcctaccgaaaccttctacggttatgaaatcgtcctgaagaaatacgataaagcgattaagacggtgcagaaatttatggaaaccgccggcgccgtttcctaccaagtgttcggagaatttgctggcaacggtatctggaaaggggtcgattatggcgagaaagacttctatgtgtttgatattctgatcaatgcggaatcaggagacaacacgtacctgactgattatgaaatgcaggacttctgtaatgaatttgggtttaagatggcaccaatgcttggtcgcggcacattcgatagcctgattatgattccgctggatttcgattcggttctcatggcttacaatgcagtggcgaaagaggacctggtaaaagcgaacaactgcgtctttgatgccaatgtgatcggtgataacactgctgaaggctatgttcttaaaccgtgtgaacccaaatggttaccgaatgggacgcgtgtggcgatcaaatgcaagaactccaaattcagcgagaagaagaaaagtgacaaaccgatcaagacacaagtcccactgacggaaattgataagaatctgctggacgtattggcctgttatgtcactttaaaccgcgtgaacaacgtgatctctaagattggaacagtgacgccgaaagattttgagaaagtaatgtggctgactgttcaggatattctggaagaaacgtcacgtgagggtattgttctgacgacatcggacaatcctgacctcgtcaagaaagaacttgtccgcatggtgcaggatgtgttaaaatcggcatggcgcgaactggtgtcg

SEQ ID NO: 542 - protein, 343 aa, synthetic construct
  REGION 1..343: note = variant of RNA ligase 2 from Escherichia phage RB69 (Bacteriophage RB69)
MHHHHHHGGSGMFKKYSSLENHYNSKFIEKLYANGLTDGVWVAREKIHGTNFSLIIERDNVTCAKRTGPIKPTETFYGYEIVLKKYDKAIKTVQKFMETAGAVSYQVFGEFAGNGIWKGVDYGEKDFYVFDILINAESGDNTYLTDYEMQDFCNEFGFKMAPMLGRGTFDSLIMIPLDFDSVLMAYNAVAKEDLVKANNCVFDANVIGDNTAEGYVLKPCEPKWLPNGTRVAIKCKNSKFSEKKKSDKPIKTQVPLTEIDKNLLDVLACYVTLNRVNNVISKIGTVTPKDFEKVMWLTVQDILEETSREGIVLTTSDNPDLVKKELVRMVQDVLKSAWRELVS

SEQ ID NO: 543 - DNA, 1029 bp, synthetic construct
  misc_feature 1..1029: note = variant of RNA ligase 2 from Escherichia phage RB69 (Bacteriophage RB69)
  source 1..1029: mol_type = other DNA
atgcatcaccatcaccatcacggtggcagcggtatgtttaagaaatattctagtctggaaaaccattacaatgcgaaattcattgagaaactctatgctaacggcttaactgatggtgtatgggttgcgcgcgaaaagatccacgggacgaacttttcgctgattatcgagcgtgataatgtaacatgcgccaaacgtacaggcccgattaagcctaccgaaaccttctacggttatgaaatcgtcctgaagaaatacgataaagcgattaagacggtgcaggaagccatggaaaccgccggcgccgtttcctaccaagtgttcggagaatttgctggcaacggtatctggaaaggggtcgattatggcgagaaagacttctatgtgtttgatattctgatcaatgcggaatcaggagacaacacgtacctgactgattatgaaatgcaggacttctgtaatgaatttgggtttaagatggcaccaatgcttggtcgcggcacattcgatagcctgattatgattccgaacgatttcgattcggttctcatggcttacaatgcagtggcgaaagaggacctggtaaaagcgaacaactgcgtctttgatgccaatgtgatcggtgataacactgctgaaggctatgttcttaaaccgtgtgaacccaaatggttaccgaatgggacgcgtgtggcgatcaaatgcaagaactccaaattcagcgagaagaagaaaagtgacaaaccgatcaagacacaagtcccactgacggaaattgataagaatctgctggacgtattggcctgttatgtcactttaaaccgcgtgaacaacgtgatctctaagattggaacagtgacgccgaaagattttgagaaagtaatgtggctgactgttcaggatattctggaagaaacgtcacgtgagggtattgttctgacgacatcggacaatcctgacctcgtcaagaaagaacttattcgcatggtgcaggatgtattagaatcggcatggcgcgaactggtgtcg

SEQ ID NO: 544 - protein, 343 aa, synthetic construct
  REGION 1..343: note = variant of RNA ligase 2 from Escherichia phage RB69 (Bacteriophage RB69)
MHHHHHHGGSGMFKKYSSLENHYNAKFIEKLYANGLTDGVWVAREKIHGTNFSLIIERDNVTCAKRTGPIKPTETFYGYEIVLKKYDKAIKTVQEAMETAGAVSYQVFGEFAGNGIWKGVDYGEKDFYVFDILINAESGDNTYLTDYEMQDFCNEFGFKMAPMLGRGTFDSLIMIPNDFDSVLMAYNAVAKEDLVKANNCVFDANVIGDNTAEGYVLKPCEPKWLPNGTRVAIKCKNSKFSEKKKSDKPIKTQVPLTEIDKNLLDVLACYVTLNRVNNVISKIGTVTPKDFEKVMWLTVQDILEETSREGIVLTTSDNPDLVKKELIRMVQDVLESAWRELVS

SEQ ID NO: 545 - DNA, 1029 bp, synthetic construct
  misc_feature 1..1029: note = variant of RNA ligase 2 from Escherichia phage RB69 (Bacteriophage RB69)
  source 1..1029: mol_type = other DNA
atgcatcaccatcaccatcacggtggcagcggtatgtttaagaaatattctagtctggaaaaccattacaataaaaaattcattgagaaactctatgctaacggcttaactgatggtgtatgggttgcgcgcgaaaagatccacgggacgaacttttcgctgattatcgagcgtgataatgtaacatgcgccaaacgtacaggcccgattaagcctgccgaaaccttctacggttatgaaatcgtcctgaagaaatacgataaagcgattaagacggtgcagaaatttatgtataccgccggcgccgtttcctaccaagtgttcggagaatttgctggcaacggtatctggaaaggggtcgattatggcgagaaagacttctatgtgtttgatattctgatcaatgcggaatcaggagacaacacgtacctgactgattatgaaatgcaggacttctgtaatgaatttgggtttaagatggcaccaatgcttggtcgcggcacattcgatagcctgattatgattccgaacgatttcgattcggttctcatggcttacaatgcagtggcgaaagaggacctggtaaaagcgaacaactgcgtctttgatgccaatgtgatcggtgataacactgctgaaggctatgttcttaaaccgtgtgaacccaaatggttaccgaatgggacgcgtgtggcgatcaaatgcaagaactccaaattcagcgagaagaagaaaagtgacaaaccgatcaagacacaagtcccactgacggaaattgataagaatctgctggacgtattggcctgttatgtcactttaaaccgcgtgaacaacgtgatctctaagattggaacagtgacgccgaaagattttgagaaagtaatgtggctgactgttcaggatattctggaagaaacgtcacgtgagggtattgttctgacgacatcggacaatcctgacctcgtcaagaaagaacttgtccgcatggtgcaggatgtgttagaatcggcatggcgcgaactggtgtcg

SEQ ID NO: 546 - protein, 343 aa, synthetic construct
  REGION 1..343: note = variant of RNA ligase 2 from Escherichia phage RB69 (Bacteriophage RB69)
MHHHHHHGGSGMFKKYSSLENHYNKKFIEKLYANGLTDGVWVAREKIHGTNFSLIIERDNVTCAKRTGPIKPAETFYGYEIVLKKYDKAIKTVQKFMYTAGAVSYQVFGEFAGNGIWKGVDYGEKDFYVFDILINAESGDNTYLTDYEMQDFCNEFGFKMAPMLGRGTFDSLIMIPNDFDSVLMAYNAVAKEDLVKANNCVFDANVIGDNTAEGYVLKPCEPKWLPNGTRVAIKCKNSKFSEKKKSDKPIKTQVPLTEIDKNLLDVLACYVTLNRVNNVISKIGTVTPKDFEKVMWLTVQDILEETSREGIVLTTSDNPDLVKKELVRMVQDVLESAWRELVS

SEQ ID NO: 547 - DNA, 1029 bp, synthetic construct
  misc_feature 1..1029: note = variant of RNA ligase 2 from Escherichia phage RB69 (Bacteriophage RB69)
  source 1..1029: mol_type = other DNA
atgcatcaccatcaccatcacggtggcagcggtatgtttaagaaatattctagtctggaaaaccattacaatagcaaattcattgagaaactctatgctaacggcttaactgatggtgtatgggttgcgcgcgaaaagatccacgggacgaacttttcgctgattatcgagcgtgataatgtaacatgcgccaaacgtacaggcccgattaagcctaccgaaaccttctacggttatgaaatcgtcctgaagaaatacgataaagcgattaagacggtgcaggaatctatgtctaccgccggcgccgtttcctaccaagtgttcggagaatttgctggcaacggtatctggaaaggggtcgattatggcgagaaagacttctatgtgtttgatattctgatcaatgcggaatcaggagacaacacgtacctgactgattatgaaatgcaggacttctgtaatgaatatgggtttaagatggcaccaatgcttggtcgcggcacattcgatagcctgattatgattccgctggatttcgattcggttctcatggcttacaatgcaaccgcgaaagaggacctggtaaaagcgaacaactgcgtctttgatgccaatgtgatcggtgataacactgctgaaggctatgttcttaaaccgtgtgaacccaaatggttaccgaatgggacgcgtgtggcgatcaaatgcaagaactccaaattcagcgagaagaagaaaagtgacaaaccgatcaagacacaagtcccactgacggaaattgataagaatctgctggacgtattggcctgttatgtcactttaaaccgcgtgaacaacgtgatctctaagattggaacagtgacgccgaaagattttgagaaagtaatgtggctgactgttcaggatattctggaagaaacgtcacgtgagggtattgttctgacgacatcggacaatcctgacctcgtcaagaaagaacttgtccgcatggtgcaggatgtgttagaatcggcatggcgcgaactggtgtcg

SEQ ID NO: 548 - protein, 343 aa, synthetic construct
  REGION 1..343: note = variant of RNA ligase 2 from Escherichia phage RB69 (Bacteriophage RB69)
MHHHHHHGGSGMFKKYSSLENHYNSKFIEKLYANGLTDGVWVAREKIHGTNFSLIIERDNVTCAKRTGPIKPTETFYGYEIVLKKYDKAIKTVQESMSTAGAVSYQVFGEFAGNGIWKGVDYGEKDFYVFDILINAESGDNTYLTDYEMQDFCNEYGFKMAPMLGRGTFDSLIMIPLDFDSVLMAYNATAKEDLVKANNCVFDANVIGDNTAEGYVLKPCEPKWLPNGTRVAIKCKNSKFSEKKKSDKPIKTQVPLTEIDKNLLDVLACYVTLNRVNNVISKIGTVTPKDFEKVMWLTVQDILEETSREGIVLTTSDNPDLVKKELVRMVQDVLESAWRELVS

SEQ ID NO: 549 - DNA, 1029 bp, synthetic construct
  misc_feature 1..1029: note = variant of RNA ligase 2 from Escherichia phage RB69 (Bacteriophage RB69)
  source 1..1029: mol_type = other DNA
atgcatcaccatcaccatcacggtggcagcggtatgtttaagaaatattctagtctggaaaaccattacaatagcaaattcattgagaaactctatgctaacggcttaactgatggtgtatgggttgcgcgcgaaaagatccacgggacgaacttttcgctgattatcgagcgtgataatgtaacatgcgccaaacgtacaggcccgattaagcctaccgaaaccttctacggttatgaaatcgtcctgaagaaatacgataaagcgattaagacggtgcagaaatttatgtctaccgccggcgccgtttcctaccaagtgttcggagaatttgctggcaacggtatctggaaaggggtcgattatggcgagaaagacttctatgtgtttgatattctgatcaatgcggaatcaggagacaacacgtacctgactgattatgaaatgcaggacttctgtaatgaatttgggtttaagatggcaccaatgcttggtcgcggcacattcgatagcctgattatgattccgaacgatttcgattcggttctcatggcttacaatgcaacggcgaaagaggacctggtaaaagcgaacaactgcgtctttgatgccaatgtgatcggtgataacactgctgaaggctatgttcttaaaccgtgtgaacccaaatggttaccgaatgggacgcgtgtggcgatcaaatgcaagaactccaaattcagcgagaagaagaaaagtgacaaaccgatcaagacacaagtcccactgacggaaattgataagaatctgctggacgtattggcctgttatgtcactttaaaccgcgtgaacaacgtgatctctaagattggaacagtgacgccgaaagattttgagaaagtaatgtggctgactgttcaggatattctggaagaaacgtcacgtgagggtattgttctgacgacatcggacaatcctgacctcgtcaagaaagaacttgtccgcatggtgcaggatgtgttaaaatcggcatggcgcgaactggtgtcg

SEQ ID NO: 550 - protein, 343 aa, synthetic construct
  REGION 1..343: note = variant of RNA ligase 2 from Escherichia phage RB69 (Bacteriophage RB69)
MHHHHHHGGSGMFKKYSSLENHYNSKFIEKLYANGLTDGVWVAREKIHGTNFSLIIERDNVTCAKRTGPIKPTETFYGYEIVLKKYDKAIKTVQKFMSTAGAVSYQVFGEFAGNGIWKGVDYGEKDFYVFDILINAESGDNTYLTDYEMQDFCNEFGFKMAPMLGRGTFDSLIMIPNDFDSVLMAYNATAKEDLVKANNCVFDANVIGDNTAEGYVLKPCEPKWLPNGTRVAIKCKNSKFSEKKKSDKPIKTQVPLTEIDKNLLDVLACYVTLNRVNNVISKIGTVTPKDFEKVMWLTVQDILEETSREGIVLTTSDNPDLVKKELVRMVQDVLKSAWRELVS

SEQ ID NO: 551 - DNA, 1029 bp, synthetic construct
  misc_feature 1..1029: note = variant of RNA ligase 2 from Escherichia phage RB69 (Bacteriophage RB69)
  source 1..1029: mol_type = other DNA
atgcatcaccatcaccatcacggtggcagcggtatgtttaagaaatattctagtctggaaaaccattacaatagcaaattcattgagaaactctatgctaacggcttaactgatggtgtatgggttgcgcgcgaaaagatccacgggacgaacttttcgctgattatcgagcgtgataatgtaacatgcgccaaacgtacaggcccgattaagcctaccgaaaccttctacggttatgaaatcgtcctgaagaaatacgataaagcgattaagacggtgcagaaatctatgtataccgccggcgccgtttcctaccaagtgttcggagaatttgctggcaacggtatctggaaaggggtcgattatggcgagaaagacttctatgtgtttgatattctgatcaatgcggaatcaggagacaacacgtacctgactgattatgaaatgcaggacttctgtaatgaatgtgggtttaagatggcaccaatgcttggtcgcggcacattcgatagcctgattatgattccgaacgatttcgattcggttctcatggcttacaatgcaacggcgaaagaggacctggtaaaagcgaacaactgcgtctttgatgccaatgtgatcggtgataacactgctgaaggctatgttcttaaaccgtgtgaacccaaatggttaccgaatgggacgcgtgtggcgatcaaatgcaagaactccaaattcagcgagaagaagaaaagtgacaaaccgatcaagacacaagtcccactgacggaaattgataagaatctgctggacgtattggcctgttatgtcactttaaaccgcgtgaacaacgtgatctctaagattggaacagtgacgccgaaagattttgagaaagtaatgtggctgactgttcaggatattctggaagaaacgtcacgtgagggtattgttctgacgacatcggacaatcctgacctcgtcaagaaagaacttgtccgcatggtgcaggatgtgttaaaatcggcatggcgcgaactggtgtcg

SEQ ID NO: 552 - protein, 343 aa, synthetic construct
  REGION 1..343: note = variant of RNA ligase 2 from Escherichia phage RB69 (Bacteriophage RB69)
MHHHHHHGGSGMFKKYSSLENHYNSKFIEKLYANGLTDGVWVAREKIHGTNFSLIIERDNVTCAKRTGPIKPTETFYGYEIVLKKYDKAIKTVQKSMYTAGAVSYQVFGEFAGNGIWKGVDYGEKDFYVFDILINAESGDNTYLTDYEMQDFCNECGFKMAPMLGRGTFDSLIMIPNDFDSVLMAYNATAKEDLVKANNCVFDANVIGDNTAEGYVLKPCEPKWLPNGTRVAIKCKNSKFSEKKKSDKPIKTQVPLTEIDKNLLDVLACYVTLNRVNNVISKIGTVTPKDFEKVMWLTVQDILEETSREGIVLTTSDNPDLVKKELVRMVQDVLKSAWRELVS

SEQ ID NO: 553 - DNA, 1029 bp, synthetic construct
  misc_feature 1..1029: note = variant of RNA ligase 2 from Escherichia phage RB69 (Bacteriophage RB69)
  source 1..1029: mol_type = other DNA
atgcatcaccatcaccatcacggtggcagcggtatgtttaagaaatattctagtctggaaaaccattacaattcgaaattcattgagaaactctatgctaacggcttaactgatggtgtatgggttgcgcgcgaaaagatccacgggacgaacttttcgctgattatcgagcgtgataatgtaacatgcgccaaacgtacaggcccgattaagcctaccgaaaccttctacggttatgaaatcgtcctgaagaaatacgataaagcgattaagacggtgcagaaatttatgtctaccgccggcgccgtttcctaccaagtgttcggagaatttgctggcaacggtatctggaaaggggtcgattatggcgagaaagacttctatgtgtttgatattctgatcaatgcggaatcaggagacaacacgtacctgactgattatgaaatgcaggacttctgtaatgaatttgggtttaagatggcaccaatgcttggtcgcggcacattcgatagcctgattatgattccgctggatttcgattcggttctcatggcttacaatgcagtggcgaaagaggacctggtaaaagcgaacaactgcgtctttgatgccaatgtgatcggtgataacactgctgaaggctatgttcttaaaccgtgtgaacccaaatggttaccgaatgggacgcgtgtggcgatcaaatgcaagaactccaaattcagcgagaagaagaaaagtgacaaaccgatcaagacacaagtcccactgacggaaattgataagaatctgctggacgtattggcctgttatgtcactttaaaccgcgtgaacaacgtgatctctaagattggaacagtgacgccgaaagattttgagaaagtaatgtggctgactgttcaggatattctggaagaaacgtcacgtgagggtattgttctgacgacatcggacaatcctgacctcgtcaagaaagaacttgtccgcatggtgcaggataccttagaatcggcatggcgcgaactggtgtcg

SEQ ID NO: 554 - protein, 343 aa, synthetic construct
  REGION 1..343: note = variant of RNA ligase 2 from Escherichia phage RB69 (Bacteriophage RB69)
MHHHHHHGGSGMFKKYSSLENHYNSKFIEKLYANGLTDGVWVAREKIHGTNFSLIIERDNVTCAKRTGPIKPTETFYGYEIVLKKYDKAIKTVQKFMSTAGAVSYQVFGEFAGNGIWKGVDYGEKDFYVFDILINAESGDNTYLTDYEMQDFCNEFGFKMAPMLGRGTFDSLIMIPLDFDSVLMAYNAVAKEDLVKANNCVFDANVIGDNTAEGYVLKPCEPKWLPNGTRVAIKCKNSKFSEKKKSDKPIKTQVPLTEIDKNLLDVLACYVTLNRVNNVISKIGTVTPKDFEKVMWLTVQDILEETSREGIVLTTSDNPDLVKKELVRMVQDTLESAWRELVS

SEQ ID NO: 555 - DNA, 1029 bp, synthetic construct
  misc_feature 1..1029: note = variant of RNA ligase 2 from Escherichia phage RB69 (Bacteriophage RB69)
  source 1..1029: mol_type = other DNA
atgcatcaccatcaccatcacggtggcagcggtatgtttaagaaatattctagtctggaaaaccattacaatagcaaattcattgagaaactctatgctaacggcttaactgatggtgtatgggttgcgcgcgaaaagatccacgggacgaacttttcgctgattatcgagcgtgataatgtaacatgcgccaaacgtacaggcccgattaagcctaccgaaaccttctacggttatgaaatcgtcctgaagaaatacgataaagcgattaagacggtgcagaaatctatgtataccgccggcgccgtttcctaccaagtgttcggagaatttgctggcaacggtatctggaaaggggtcgattatggcgagaaagacttctatgtgtttgatattctgatcaatgcggaatcaggagacaacacgtacctgactgattatgaaatgcaggacttctgtaatgaatgtgggtttaagatggcaccaatgcttggtcgcggcacattcgatagcctgattatgattccgaacgatttcgattcggttctcatggcttacaatgcaacggcgaaagaggacctggtaaaagcgaacaactgcgtctttgatgccaatgtgatcggtgataacactgctgaaggctatgttcttaaaccgtgtgaacccaaatggttaccgaatgggacgcgtgtggcgatcaaatgcaagaactccaaattcagcgagaagaagaaaagtgacaaaccgatcaagacacaagtcccactgacggaaattgataagaatctgctggacgtattggcctgttatgtcactttaaaccgcgtgaacaacgtgatctctaagattggaacagtgacgccgaaagatttttataaagtaatgtggctgactgttcaggatattctggaagaaacgtcacgtgagggtattgttctgacgacatcggacaatcctgacctcgtcaagaaagaacttgtccgcatggtgcaggatgtgttaaaatcggcatggcgcgaactggtgtcg

SEQ ID NO: 556 - protein, 343 aa, synthetic construct
  REGION 1..343: note = variant of RNA ligase 2 from Escherichia phage RB69 (Bacteriophage RB69)
MHHHHHHGGSGMFKKYSSLENHYNSKFIEKLYANGLTDGVWVAREKIHGTNFSLIIERDNVTCAKRTGPIKPTETFYGYEIVLKKYDKAIKTVQKSMYTAGAVSYQVFGEFAGNGIWKGVDYGEKDFYVFDILINAESGDNTYLTDYEMQDFCNECGFKMAPMLGRGTFDSLIMIPNDFDSVLMAYNATAKEDLVKANNCVFDANVIGDNTAEGYVLKPCEPKWLPNGTRVAIKCKNSKFSEKKKSDKPIKTQVPLTEIDKNLLDVLACYVTLNRVNNVISKIGTVTPKDFYKVMWLTVQDILEETSREGIVLTTSDNPDLVKKELVRMVQDVLKSAWRELVS

SEQ ID NO: 557 - DNA, 1029 bp, synthetic construct
  misc_feature 1..1029: note = variant of RNA ligase 2 from Escherichia phage RB69 (Bacteriophage RB69)
  source 1..1029: mol_type = other DNA
atgcatcaccatcaccatcacggtggcagcggtatgtttaagaaatattctagtctggaaaaccattacaatagcaaattcattgagaaactctatgctaacggcttaactgatggtgtatgggttgcgcgcgaaaagatccacgggacgaacttttcgctgattatcgagcgtgataatgtaacatgcgccaaacgtacaggcccgattaagcctaccgaaaccttctacggttatgaaatcgtcctgaagaaatacgataaagcgattaagacggtgcagaaatctatgtataccgccggcgccgtttcctaccaagtgttcggagaatttgctggcaacggtatctggaaaggggtcgattatggcgagaaagacttctatgtgtttgatattctgatcaatgcggaatcaggagacaacacgtacctgactgatttggaaatgcaggacttctgtaatgaatgtgggtttaagatggcaccaatgcttggtcgcggcacattcgatagcctgattatgattccgaacgatttcgattcggttctcatggcttacaatgcaacggcgaaagaggacctggtaaaagcgaacaactgcgtctttgatgccaatgtgatcggtgataacactgctgaaggctatgttcttaaaccgtgtgaacccaaatggttaccgaatgggacgcgtgtggcgatcaaatgcaagaactccaaattcagcgagaagaagaaaagtgacaaaccgatcaagacacaagtcccactgacggaaattgataagaatctgctggacgtattggcctgttatgtcactttaaaccgcgtgaacaacgtgatctctaagattggaacagtgacgccgaaagattttgagaaagtaatgtggctgactgttcaggatattctggaagaaacgtcacgtgagggtattgttctgacgacatcggacaatcctgacctcgtcaagaaagaacttgtccgcatggtgcaggatgtgttaaaatcggcatggcgcgaactggtgtcg

SEQ ID NO: 558 - protein, 343 aa, synthetic construct
  REGION 1..343: note = variant of RNA ligase 2 from Escherichia phage RB69 (Bacteriophage RB69)
MHHHHHHGGSGMFKKYSSLENHYNSKFIEKLYANGLTDGVWVAREKIHGTNFSLIIERDNVTCAKRTGPIKPTETFYGYEIVLKKYDKAIKTVQKSMYTAGAVSYQVFGEFAGNGIWKGVDYGEKDFYVFDILINAESGDNTYLTDLEMQDFCNECGFKMAPMLGRGTFDSLIMIPNDFDSVLMAYNATAKEDLVKANNCVFDANVIGDNTAEGYVLKPCEPKWLPNGTRVAIKCKNSKFSEKKKSDKPIKTQVPLTEIDKNLLDVLACYVTLNRVNNVISKIGTVTPKDFEKVMWLTVQDILEETSREGIVLTTSDNPDLVKKELVRMVQDVLKSAWRELVS

SEQ ID NO: 559 - DNA, 1029 bp, synthetic construct
  misc_feature 1..1029: note = variant of RNA ligase 2 from Escherichia phage RB69 (Bacteriophage RB69)
  source 1..1029: mol_type = other DNA
atgcatcaccatcaccatcacggtggcagcggtatgtttaagaaatattctagtctggaaaaccattacaatagcaaattcattgagaaactctatgctaacggcttaactgatggtgtatgggttgcgcgcgaaaagatccacgggacgaacttttcgctgattatcgagcgtgataatgtaacatgcgccaaacgtacaggcccgattaagcctaccgaaaccttctacggttatgaaatcgtcctgaagaaatacgataaagcgattaagacggtgcagaaatctatgtataccgccggcgccgtttcctaccaagtgttcggagaatttgctggcaacggtatctggaaaggggtcgattatggcgagaaagacttctatgtgtttgatattctgatcaatgcggaatcaggagacaacacgtacctgactgattatgaaatgcaggacttctgtaatgaatgtgggtttaagatggcaccaatgcttggtcgcggcacattcgatagcctgattatgattccgaacgatttcgattcggttctcatggcttacaatgcaacggcgaaagaggacctggtaaaagcgaacaactgcgtctttgatgccaatgtgatcggtgataacactgctgaaggctatgttcttaaaccgtgtgaacccaaatggttaccgaatgggacgcgtgtggcgatcaaatgcaagaactccaaattcagcgagaagaagaaaagtgacaaaccgatcaagacacaagtcagtctgacggaaattgataagaatctgctggacgtattggcctgttatgtcactttaaaccgcgtgaacaacgtgatctctaagattggaacagtgacgccgaaagattttgagaaagtaatgtggctgactgttcaggatattctggaagaaacgtcacgtgagggtattgttctgacgacatcggacaatcctgacctcgtcaagaaagaacttgtccgcatggtgcaggatgtgttaaaatcggcatggcgcgaactggtgtcg

SEQ ID NO: 560 - protein, 343 aa, synthetic construct
  REGION 1..343: note = variant of RNA ligase 2 from Escherichia phage RB69 (Bacteriophage RB69)
MHHHHHHGGSGMFKKYSSLENHYNSKFIEKLYANGLTDGVWVAREKIHGTNFSLIIERDNVTCAKRTGPIKPTETFYGYEIVLKKYDKAIKTVQKSMYTAGAVSYQVFGEFAGNGIWKGVDYGEKDFYVFDILINAESGDNTYLTDYEMQDFCNECGFKMAPMLGRGTFDSLIMIPNDFDSVLMAYNATAKEDLVKANNCVFDANVIGDNTAEGYVLKPCEPKWLPNGTRVAIKCKNSKFSEKKKSDKPIKTQVSLTEIDKNLLDVLACYVTLNRVNNVISKIGTVTPKDFEKVMWLTVQDILEETSREGIVLTTSDNPDLVKKELVRMVQDVLKSAWRELVS

SEQ ID NO: 561 - DNA, 1029 bp, synthetic construct
  misc_feature 1..1029: note = variant of RNA ligase 2 from Escherichia phage RB69 (Bacteriophage RB69)
  source 1..1029: mol_type = other DNA
atgcatcaccatcaccatcacggtggcagcggtatgtttaagaaatattctagtctggaaaaccattacaatagcaaattcattgagaaactctatgctaacggcttaactgatggtgtatgggttgcgcgcgaaaagatccacgggacgaacttttcgctgattatcgagcgtgataatgtaacatgcgccaaacgtacaggcccgattaagcctaccgaaaccttctacggttatgaaatcgtcctgaagaaatacgataaagcgattaagacggtgcagaaatctatgtataccgccggcgccgtttcctaccaagtgttcggagaatttgctggcaacggtatctggaaaggggtcgattatggcgagaaagacttctatgtgtttgatattctgatcaatgcggaatcaggagacaacacgtacctgactgattatgaaatgcaggacttctgtaatgaatgtgggtttaagatggcaccaatgcttggtcgcggcacattcgatagcctgattatgattccgaacgatttcgattcggttctcatggcttacaatgcaacggcgaaagaggacctggtaaaagcgaacaactgcgtctttgatgccaatgtgatcggtgataacactgctgaaggctatgttcttaaaccgtgtgaacccaaatggttaccgaatgggacgcgtgtggcgatcaaatgcaagaactccaaattcagcgagaagaagaaaagtgacaaaccgatcaagacacaagtcccactgacggaaattgataagaatctgctggacgtattggcctgttatgtcactttaaaccgcgtgaacaacgtgatctctaagattggaacagtgacgccgaaagattttgagaaagtacggtggctgactgttcaggatattctggaagaaacgtcacgtgagggtattgttctgacgacatcggacaatcctgacctcgtcaagaaagaacttgtccgcatggtgcaggatgtgttaaaatcggcatggcgcgaactggtgtcg

SEQ ID NO: 562 - protein, 343 aa, synthetic construct
  REGION 1..343: note = variant of RNA ligase 2 from Escherichia phage RB69 (Bacteriophage RB69)
MHHHHHHGGSGMFKKYSSLENHYNSKFIEKLYANGLTDGVWVAREKIHGTNFSLIIERDNVTCAKRTGPIKPTETFYGYEIVLKKYDKAIKTVQKSMYTAGAVSYQVFGEFAGNGIWKGVDYGEKDFYVFDILINAESGDNTYLTDYEMQDFCNECGFKMAPMLGRGTFDSLIMIPNDFDSVLMAYNATAKEDLVKANNCVFDANVIGDNTAEGYVLKPCEPKWLPNGTRVAIKCKNSKFSEKKKSDKPIKTQVPLTEIDKNLLDVLACYVTLNRVNNVISKIGTVTPKDFEKVRWLTVQDILEETSREGIVLTTSDNPDLVKKELVRMVQDVLKSAWRELVS

SEQ ID NO: 563 - DNA, 1029 bp, synthetic construct
  misc_feature 1..1029: note = variant of RNA ligase 2 from Escherichia phage RB69 (Bacteriophage RB69)
  source 1..1029: mol_type = other DNA
atgcatcaccatcaccatcacggtggcagcggtatgtttaagaaatattctagtctggaaaaccattacaatagcaaattcattgagaaactctatgctaacggcttaactgatggtgtatgggttgcgcgcgaaaagatccacgggacgaacttttcgctgattatcgagcgtgataatgtaacatgcgccaaacgtacaggcccgattaagcctaccgaacttttctacggttatgaaatcgtcctgaagaaatacgataaagcgattaagacggtgcagaaatctatgtataccgccggcgccgtttcctaccaagtgttcggagaatttgctggcaacggtatctggaaaggggtcgattatggcgagaaagacttctatgtgtttgatattctgatcaatgcggaatcaggagacaacacgtacctgactgattatgaaatgcaggacttctgtaatgaatgtgggtttaagatggcaccaatgcttggtcgcggcacattcgatagcctgattatgattccgaacgatttcgattcggttctcatggcttacaatgcaacggcgaaagaggacctggtaaaagcgaacaactgcgtctttgatgccaatgtgatcggtgataacactgctgaaggctatgttcttaaaccgtgtgaacccaaatggttaccgaatgggacgcgtgtggcgatcaaatgcaagaactccaaattcagcgagaagaagaaaagtgacaaaccgatcaagacacaagtcccactgacggaaattgataagaatctgctggacgtattggcctgttatgtcactttaaaccgcgtgaacaacgtgatctctaagattggaacagtgacgccgaaagattttgagaaagtaatgtggctgactgttcaggatattctggaagaaacgtcacgtgagggtattgttctgacgacatcggacaatcctgacctcgtcaagaaagaacttgtccgcatggtgcaggatgtgttaaaatcggcatggcgcgaactggtgtcg

SEQ ID NO: 564 - protein, 343 aa, synthetic construct
  REGION 1..343: note = variant of RNA ligase 2 from Escherichia phage RB69 (Bacteriophage RB69)
MHHHHHHGGSGMFKKYSSLENHYNSKFIEKLYANGLTDGVWVAREKIHGTNFSLIIERDNVTCAKRTGPIKPTELFYGYEIVLKKYDKAIKTVQKSMYTAGAVSYQVFGEFAGNGIWKGVDYGEKDFYVFDILINAESGDNTYLTDYEMQDFCNECGFKMAPMLGRGTFDSLIMIPNDFDSVLMAYNATAKEDLVKANNCVFDANVIGDNTAEGYVLKPCEPKWLPNGTRVAIKCKNSKFSEKKKSDKPIKTQVPLTEIDKNLLDVLACYVTLNRVNNVISKIGTVTPKDFEKVMWLTVQDILEETSREGIVLTTSDNPDLVKKELVRMVQDVLKSAWRELVS

SEQ ID NO: 565 - DNA, 1029 bp, synthetic construct
  misc_feature 1..1029: note = variant of RNA ligase 2 from Escherichia phage RB69 (Bacteriophage RB69)
  source 1..1029: mol_type = other DNA
atgcatcaccatcaccatcacggtggcagcggtatgtttaagaaatattctagtctggaaaaccattacaatagcaaattcattgagaaactctatgctaacggcttaactgatggtgtatgggttgcgcgcgaaaagatccacgggacgaacttttcgctgattatcgagcgtgataatgtaacatgcgccaaacgtacaggcccgattaagcctaccgaaaccttctacggttatgaaatcgtcctgaagaaatacgataaagcgattaagacggtgcagaaatctatgtataccgccggcgccgtttcctaccaagtgttcggagaatttgctggcaacggtatctggaaaggggtcgattatggcgagaaagacttctatgtgtttgatattctgatcaatgcggaatcaggagacaacacgtacctgactgattatgaaatgcaggacttctgtaatgaatgtgggtttaagatggcaccaatgcttggtcgcggcacattcgatagcctgattatgattccgaacgatttcgattcggttctcatggcttacaatgcaacggcgaaagaggacctggtaaaagcgaacaactgcgtctttgatgccaatgtgatcggtgataacactgctgaaggctatgttcttaaaccgtgtgaacccaaatggttaccgaatgggacgcgtgtggcgatcaaatgcaagaactccaaattcagcgagaagaagaaaagtgacaaaccgatcaagacacaagtcccactgacggaaattgataagaatctgctggacgtattggcctgttatgtcactttaaaccgcgtgaacaacgtgatctctaagattggaacagtgacgccgaaagattttgagaaagtaatgtggctgactgttgaggatattctggaagaaacgtcacgtgagggtattgttctgacgacatcggacaatcctgacctcgtcaagaaagaacttgtccgcatggtgcaggatgtgttaaaatcggcatggcgcgaactggtgtcg

SEQ ID NO: 566 - protein, 343 aa, synthetic construct
  REGION 1..343: note = variant of RNA ligase 2 from Escherichia phage RB69 (Bacteriophage RB69)
MHHHHHHGGSGMFKKYSSLENHYNSKFIEKLYANGLTDGVWVAREKIHGTNFSLIIERDNVTCAKRTGPIKPTETFYGYEIVLKKYDKAIKTVQKSMYTAGAVSYQVFGEFAGNGIWKGVDYGEKDFYVFDILINAESGDNTYLTDYEMQDFCNECGFKMAPMLGRGTFDSLIMIPNDFDSVLMAYNATAKEDLVKANNCVFDANVIGDNTAEGYVLKPCEPKWLPNGTRVAIKCKNSKFSEKKKSDKPIKTQVPLTEIDKNLLDVLACYVTLNRVNNVISKIGTVTPKDFEKVMWLTVEDILEETSREGIVLTTSDNPDLVKKELVRMVQDVLKSAWRELVS

SEQ ID NO: 567 - DNA, 1029 bp, synthetic construct
  misc_feature 1..1029: note = variant of RNA ligase 2 from Escherichia phage RB69 (Bacteriophage RB69)
  source 1..1029: mol_type = other DNA
atgcatcaccatcaccatcacggtggcagcggtatgtttaagaaatattctagtctggaaaaccattacaatagcaaattcattgagaaactctatgctaacggcttaactgatggtgtatgggttgcgcgcgaaaagatccacgggacgaacttttcgctgattatcgagcgtgataatgtaacatgcgccaaacgtacaggcccgattaagcctaccgaaaccttctacggttatgaaatcgtcctgaagaaatacgataaagcgattaagacggtgcagaaatctatgtataccgccggcgccgtttcctaccaagtgttcggagaatttgctggcaacggtatctggaaaggggtcgattatggcgagaaagacttctatgtgtttgatattctgatcaatgcggaatcaggagacaacacgtacctgactgattatgaaatgcaggacttctgtaatgaatgtgggtttaagatggcaccaatgcttggtcgcggcacattcgatagcctgattatgattccgaacgatttcgattcggttcttatggcttacaatgcaacggcgaaagaggacctggtaaaagcgaacaactgcgtctttgatgccaatgtgatcggtgataacactgctgaaggctatgttcttaaaccgtgtgaacccaaatggttaccgaatgggacgcgtgtggcgatcaaatgcaagaactccaaattcagcgagaagaagaaaagtgacaaaccgatcaagacacaagtcccactgacggaaattgataagaatctgctggacgtattggcctgttatgtcactttaaaccgcgtgaacaacgtgatctctaagattggaacagtgacgccgaaagattttgagaaagtaatgtggctgactgttcaggatattctggaagaaacgtcacgtgagggtattgttctgacgacatcggacaatcctgacctcgtcaagaaagaacttgtccgcatggtgcaggatgagttaaaatcggcatggcgcgaactggtgtcg

SEQ ID NO: 568 - protein, 343 aa, synthetic construct
  REGION 1..343: note = variant of RNA ligase 2 from Escherichia phage RB69 (Bacteriophage RB69)
MHHHHHHGGSGMFKKYSSLENHYNSKFIEKLYANGLTDGVWVAREKIHGTNFSLIIERDNVTCAKRTGPIKPTETFYGYEIVLKKYDKAIKTVQKSMYTAGAVSYQVFGEFAGNGIWKGVDYGEKDFYVFDILINAESGDNTYLTDYEMQDFCNECGFKMAPMLGRGTFDSLIMIPNDFDSVLMAYNATAKEDLVKANNCVFDANVIGDNTAEGYVLKPCEPKWLPNGTRVAIKCKNSKFSEKKKSDKPIKTQVPLTEIDKNLLDVLACYVTLNRVNNVISKIGTVTPKDFEKVMWLTVQDILEETSREGIVLTTSDNPDLVKKELVRMVQDELKSAWRELVS

SEQ ID NO: 569 - DNA, 1029 bp, synthetic construct
  misc_feature 1..1029: note = variant of RNA ligase 2 from Escherichia phage RB69 (Bacteriophage RB69)
  source 1..1029: mol_type = other DNA
atgcatcaccatcaccatcacggtggcagcggtatgtttaagaaatattctagtctggaaaaccattacaatagcaaattcattgagaaactctatgctaacggcttaactgatggtgtatgggttgcgcgcgaaaagatccacgggacgaacttttcgctgattatcgagcgtgataatgtaacatgcgccaaacgtacaggcccgattaagcctaccgaaaccttctacggttatgaaatcgtcctgaagaaatacgataaagcgattaagacggtgcagaaatctatgtataccgccggcgccgtttcctaccaagtgttcggagaatttgctggcaacggtatctggaaaggggtcgattatggcgagaaagacttctatgtgtttgatattctgatcaatgcggaatcaggagacaacacgtacctgactgattatgaaatgcaggacttctgtaatgaatgtgggtttaagatggcaccaatgcttggtcgcggcacattcgatagcctgattatgattccgaacgatttcgattcggttctcatggcttacaatgcaacggcgaaagaggacctggtaaaagcgaacaacagtgtctttgatgccaatgtgatcggtgataacactgctgaaggctatgttcttaaaccgtgtgaacccaaatggttaccgaatgggacgcgtgtggcgatcaaatgcaagaactccaaattcagcgagaagaagaaaagtgacaaaccgatcaagacacaagtcccactgacggaaattgataagaatctgctggacgtattggcctgttatgtcactttaaaccgcgtgaacaacgtgatctctaagattggaacagtgacgccgaaagattttgagaaagtaatgtggctgactgttcaggatattctggaagaaacgtcacgtgagggtattgttctgacgacatcggacaatcctgacctcgtcaagaaagaacttgtccgcatggtgcaggatgtgttaaaatcggcatggcgcgaactggtgtcg

SEQ ID NO: 570 - protein, 343 aa, synthetic construct
  REGION 1..343: note = variant of RNA ligase 2 from Escherichia phage RB69 (Bacteriophage RB69)
MHHHHHHGGSGMFKKYSSLENHYNSKFIEKLYANGLTDGVWVAREKIHGTNFSLIIERDNVTCAKRTGPIKPTETFYGYEIVLKKYDKAIKTVQKSMYTAGAVSYQVFGEFAGNGIWKGVDYGEKDFYVFDILINAESGDNTYLTDYEMQDFCNECGFKMAPMLGRGTFDSLIMIPNDFDSVLMAYNATAKEDLVKANNSVFDANVIGDNTAEGYVLKPCEPKWLPNGTRVAIKCKNSKFSEKKKSDKPIKTQVPLTEIDKNLLDVLACYVTLNRVNNVISKIGTVTPKDFEKVMWLTVQDILEETSREGIVLTTSDNPDLVKKELVRMVQDVLKSAWRELVS

SEQ ID NO: 571 - DNA, 1029 bp, synthetic construct
  misc_feature 1..1029: note = variant of RNA ligase 2 from Escherichia phage RB69 (Bacteriophage RB69)
  source 1..1029: mol_type = other DNA
atgcatcaccatcaccatcacggtggcagcggtatgtttaagaaatattctagtctggaaaaccattacaatagcaaattcattgagaaactctatgctaacggcttaactgatggtgtatgggttgcgcgcgaaaagatccacgggacgaacttttcgctgattatcgagcgtgataatgtaacatgcgccaaacgtacaggcccgattaagcctaccgaaaccttctacggttatgaaatcgtcctgaagaaatacgataaagcgattaagacggtgcagaaatctatgtataccgccggcgccgtttcctaccaagtgttcggagaatttgctggcaacggtatctggaaaggggtcgattatggcgagaaagacttctatgtgtttgatattctgatcaatgcggaatcaggagacaacacgtacctgactgattatgaaatgcaggacttctgtaatgaatgtgggtttaagatggcaccaatgcttggtcgcggcacattcgatagcctgattatgattccgaacgatttcgattcggttctcatggcttacaatgcaacggcgaaagaggacctggtaaaagcgaacaactgcgtctttgatgccaatgtgatcggtgataacactgctgaaggctatgttcttaaaccgtgtgaacccaaatggttaccgaatgggacgcgtgtggcgatcaaatgcaagaactccaaattcagcgagaagaagaaaagtgacaaaccgatcaagacacaagtcccactgacggaaattgataagaatctgctggacgtattggcctgttatgtcactttaaaccgcgtgaacaacgtgatctctaagattggaacagtgacgccgtctgattttgagaaagtaatgtggctgactgttcaggatattctggaagaaacgtcacgtgagggtattgttctgacgacatcggacaatcctgacctcgtcaagaaagaacttgtccgcatggtgcaggatgtgttaaaatcggcatggcgcgaactggtgtcg

SEQ ID NO: 572 - protein, 343 aa, synthetic construct
  REGION 1..343: note = variant of RNA ligase 2 from Escherichia phage RB69 (Bacteriophage RB69)
MHHHHHHGGSGMFKKYSSLENHYNSKFIEKLYANGLTDGVWVAREKIHGTNFSLIIERDNVTCAKRTGPIKPTETFYGYEIVLKKYDKAIKTVQKSMYTAGAVSYQVFGEFAGNGIWKGVDYGEKDFYVFDILINAESGDNTYLTDYEMQDFCNECGFKMAPMLGRGTFDSLIMIPNDFDSVLMAYNATAKEDLVKANNCVFDANVIGDNTAEGYVLKPCEPKWLPNGTRVAIKCKNSKFSEKKKSDKPIKTQVPLTEIDKNLLDVLACYVTLNRVNNVISKIGTVTPSDFEKVMWLTVQDILEETSREGIVLTTSDNPDLVKKELVRMVQDVLKSAWRELVS

SEQ ID NO: 573 - DNA, 1029 bp, synthetic construct
  misc_feature 1..1029: note = variant of RNA ligase 2 from Escherichia phage RB69 (Bacteriophage RB69)
  source 1..1029: mol_type = other DNA
atgcatcaccatcaccatcacggtggcagcggtatgtttaagaaatattctagtctggaaaaccattacaatagcaaattcattgagaaactctatgctaacggcttaactgatggtgtatgggttgcgcgcgaaaagatccacgggacgaacttttcgctgattatcgagcgtgataatgtaacatgcgccaaacgtacaggcccgattaagcctaccgaaaccttctacggttatgaaatcgtcctgaagaaatacgataaagcgattaagacggtgcaggtttctatgtataccgccggcgccgtttcctaccaagtgttcggagaatttgctggcaacggtatctggaaaggggtcgattatggcgagaaagacttctatgtgtttgatattctgatcaatgcggaatcaggagacaacacgtacctgactgattatgaaatgcaggacttctgtaatgaatgtgggtttaagatggcaccaatgcttggtcgcggcacattcgatagcctgattatgattccgaacgatttcgattcggttctcatggcttacaatgcaacggcgaaagaggacctggtaaaagcgaacaactgcgtctttgatgccaatgtgatcggtgataacactgctgaaggctatgttcttaaaccgtgtgaacccaaatggttaccgaatgggacgcgtgtggcgatcaaatgcaagaactccaaattcagcgagaagaagaaaagtgacaaaccgatcaagacacaagtcccactgacggaaattgataagaatctgctggacgtattggcctgttatgtcactttaaaccgcgtgaacaacgtgatctctaagattggaacagtgacgccgaaagattttgagaaagtaatgtggctgactgttcaggatattctggaagaaacgtcacgtgagggtattgttctgacgacatcggacaatcctgacctcgtcaagaaagaacttgtccgcatggtgcaggatgtgttaaaatcggcatggcgcgaactggtgtcg

SEQ ID NO: 574 - protein, 343 aa, synthetic construct
  REGION 1..343: note = variant of RNA ligase 2 from Escherichia phage RB69 (Bacteriophage RB69)
MHHHHHHGGSGMFKKYSSLENHYNSKFIEKLYANGLTDGVWVAREKIHGTNFSLIIERDNVTCAKRTGPIKPTETFYGYEIVLKKYDKAIKTVQVSMYTAGAVSYQVFGEFAGNGIWKGVDYGEKDFYVFDILINAESGDNTYLTDYEMQDFCNECGFKMAPMLGRGTFDSLIMIPNDFDSVLMAYNATAKEDLVKANNCVFDANVIGDNTAEGYVLKPCEPKWLPNGTRVAIKCKNSKFSEKKKSDKPIKTQVPLTEIDKNLLDVLACYVTLNRVNNVISKIGTVTPKDFEKVMWLTVQDILEETSREGIVLTTSDNPDLVKKELVRMVQDVLKSAWRELVS

SEQ ID NO: 575 - DNA, 1029 bp, synthetic construct
  misc_feature 1..1029: note = variant of RNA ligase 2 from Escherichia phage RB69 (Bacteriophage RB69)
  source 1..1029: mol_type = other DNA
atgcatcaccatcaccatcacggtggcagcggtatgtttaagaaatattctagtctggaaaaccattacaatagcaaattcattgagaaactctatgctaacggcttaactgatggtgtatgggttgcgcgcgaaaagatccacgggacgaacttttcgctgattatcgagcgtgataatgtaacatgcgccaaacgtacaggcccgattaagcctaccgaaaccttctacggttatgaaatcgtcctgaagaaatacgataaagcgattaagacggtgcagaaatctatgtataccgccggcgccgtttcctaccaagtgttcggagaatttgctggcaacggtatctggaaaggggtcgattatggcgagaaagacttctatgtgtttgatattctgatcaatgcggaatcaggagacaacacgtacctgactgattatgaaatgcaggacttctgtaatgaatgtgggtttaagatggcaccaatgcttggtcgcggcacattcgatagcctgattatgattccgaacgatttcgattcggttctcatggcttacaatgcaacggcgaaagaggacctggtaaaagcgaacaactgcgtctttgatgccaatgtgatcggtgataacactgctgaaggctatgttcttaaaccgtgtgaacccaaatggttaccgaatgggacgcgtgtggcgatcaaatgcaagaactccaaattcagcgagaagaagaaaagtgacaaaccgatcaagacacaagtcccactgacggaaattgataagaatctgctggacgtattggcctgttatgtcactttaaaccgcgtgaacaacgtgatctctaagattggaacagtgacgccggcggattttgagaaagtaatgtggctgactgttcaggatattctggaagaaacgtcacgtgagggtattgttctgacgacatcggacaatcctgacctcgtcaagaaagaacttgtccgcatggtgcaggatgtgttaaaatcggcatggcgcgaactggtgtcg

SEQ ID NO: 576 - protein, 343 aa, synthetic construct
  REGION 1..343: note = variant of RNA ligase 2 from Escherichia phage RB69 (Bacteriophage RB69)
MHHHHHHGGSGMFKKYSSLENHYNSKFIEKLYANGLTDGVWVAREKIHGTNFSLIIERDNVTCAKRTGPIKPTETFYGYEIVLKKYDKAIKTVQKSMYTAGAVSYQVFGEFAGNGIWKGVDYGEKDFYVFDILINAESGDNTYLTDYEMQDFCNECGFKMAPMLGRGTFDSLIMIPNDFDSVLMAYNATAKEDLVKANNCVFDANVIGDNTAEGYVLKPCEPKWLPNGTRVAIKCKNSKFSEKKKSDKPIKTQVPLTEIDKNLLDVLACYVTLNRVNNVISKIGTVTPADFEKVMWLTVQDILEETSREGIVLTTSDNPDLVKKELVRMVQDVLKSAWRELVS

SEQ ID NO: 577 - DNA, 1029 bp, synthetic construct
  misc_feature 1..1029: note = variant of RNA ligase 2 from Escherichia phage RB69 (Bacteriophage RB69)
  source 1..1029: mol_type = other DNA
atgcatcaccatcaccatcacggtggcagcggtatgtttaagaaatattctagtctggaaaaccattacaatagcaaattcattgagaaactctatgctaacggcttaactgatggtgtatgggttgcgcgcgaaaagatccacgggacgaacttttcgctgattatcgagcgtgataatgtaacatgcgccaaacgtacaggcccgattaagcctaccgaaaccttctacggttatgaaatcgtcctgaagaaatacgataaagcgattaagacggtgcagaaatctatgtataccgccggcgccgtttcctaccaagtgttcggagaatttgctggcaacggtatctggaaaggggtcgattatggcgagaaagacttctatgtgtttgatattctgatcaatgcggaatcaggagacaacacgtacctgactgattatgaaatgcaggacttctgtaatgaatgtgggtttaagatggcaccaatgcttggtcgcggcacattcgatagcctgattatgattccgaacgatttcgattcggttctcatggcttacaatgcaacggcgaaagaggacctggtaaaagcgaacaactgcgtctttgatgccaatgtgatcggtgataacactgctgaaggctatgttcttaaaccgtgtgaacccaaatggttaccgaatgggacgcgtgtggcgatcaaatgcaagaactccaaattcagcgagaagaagaaaagtgacaaaccgatcaagacacaagtcccactgacggaaattgataagaatctgctggacgtattggcctgttatgtcactttaaaccgcgtgaacaacgtgatctctaagattggaacagtgacgccgacggattttgagaaagtaatgtggctgactgttcaggatattctggaagaaacgtcacgtgagggtattgttctgacgacatcggacaatcctgacctcgtcaagaaagaacttgtccgcatggtgcaggatgtgttaaaatcggcatggcgcgaactggtgtcg

SEQ ID NO: 578 - protein, 343 aa, synthetic construct
  REGION 1..343: note = variant of RNA ligase 2 from Escherichia phage RB69 (Bacteriophage RB69)
MHHHHHHGGSGMFKKYSSLENHYNSKFIEKLYANGLTDGVWVAREKIHGTNFSLIIERDNVTCAKRTGPIKPTETFYGYEIVLKKYDKAIKTVQKSMYTAGAVSYQVFGEFAGNGIWKGVDYGEKDFYVFDILINAESGDNTYLTDYEMQDFCNECGFKMAPMLGRGTFDSLIMIPNDFDSVLMAYNATAKEDLVKANNCVFDANVIGDNTAEGYVLKPCEPKWLPNGTRVAIKCKNSKFSEKKKSDKPIKTQVPLTEIDKNLLDVLACYVTLNRVNNVISKIGTVTPTDFEKVMWLTVQDILEETSREGIVLTTSDNPDLVKKELVRMVQDVLKSAWRELVS

SEQ ID NO: 579 - DNA, 1029 bp, synthetic construct
  misc_feature 1..1029: note = variant of RNA ligase 2 from Escherichia phage RB69 (Bacteriophage RB69)
  source 1..1029: mol_type = other DNA
atgcatcaccatcaccatcacggtggcagcggtatgtttaagaaatattctagtctggaaaaccattacaatagcaaattcattgagaaactctatgctaacggcttaactgatggtgtatgggttgcgcgcgaaaagatccacgggacgaacttttcgctgattatcgagcgtgataatgtaacatgcgccaaacgtacaggcccgattaagcctaccgaaaccttctacggttatgaaatcgtcctgaagaaatacgataaagcgattaagacggtgcagaaatctatgtataccgccggcgccgtttcctaccaagtgttcggagaatttgctggcaacggtatctggaaaggggtcgattatggcgagaaagacttctatgtgtttgatattctgatcaatgcggaatcaggagacaacacgtacctgactgattatgaaatgcaggacttctgtaatgaatgtgggtttaagatggcaccaatgcttggtcgcggcgcgttcgatagcctgattatgattccgaacgatttcgattcggttctcatggcttacaatgcaacggcgaaagaggacctggtaaaagcgaacaactgcgtctttgatgccaatgtgatcggtgataacactgctgaaggctatgttcttaaaccgtgtgaacccaaatggttaccgaatgggacgcgtgtggcgatcaaatgcaagaactccaaattcagcgagaagaagaaaagtgacaaaccgatcaagacacaagtcccactgacggaaattgataagaatctgctggacgtattggcctgttatgtcactttaaaccgcgtgaacaacgtgatctctaagattggaacagtgacgccgaaagattttgagaaagtaatgtggctgactgttcaggatattctggaagaaacgtcacgtgagggtattgttctgacgacatcggacaatcctgacctcgtcaagaaagaacttgtccgcatggtgcaggatgtgttaaaatcggcatggcgcgaactggtgtcg

SEQ ID NO: 580 - protein, 343 aa, synthetic construct
  REGION 1..343: note = variant of RNA ligase 2 from Escherichia phage RB69 (Bacteriophage RB69)
MHHHHHHGGSGMFKKYSSLENHYNSKFIEKLYANGLTDGVWVAREKIHGTNFSLIIERDNVTCAKRTGPIKPTETFYGYEIVLKKYDKAIKTVQKSMYTAGAVSYQVFGEFAGNGIWKGVDYGEKDFYVFDILINAESGDNTYLTDYEMQDFCNECGFKMAPMLGRGAFDSLIMIPNDFDSVLMAYNATAKEDLVKANNCVFDANVIGDNTAEGYVLKPCEPKWLPNGTRVAIKCKNSKFSEKKKSDKPIKTQVPLTEIDKNLLDVLACYVTLNRVNNVISKIGTVTPKDFEKVMWLTVQDILEETSREGIVLTTSDNPDLVKKELVRMVQDVLKSAWRELVS

SEQ ID NO: 581 - DNA, 1029 bp, synthetic construct
  misc_feature 1..1029: note = variant of RNA ligase 2 from Escherichia phage RB69 (Bacteriophage RB69)
  source 1..1029: mol_type = other DNA
atgcatcaccatcaccatcacggtggcagcggtatgtttaagaaatattctagtctggaaaaccattacaatagcaaattcattgagaaactctatgctaacggcttaactgatggtgtatgggttgcgcgcgaaaagatccacgggacgaacttttcgctgattatcgagcgtgataatgtaacatgcgccaaacgtacaggcccgattaagcctaccgaaaccttctacggttatgaaatcgtcctgaagaaatacgataaagcgattaagacggtgcagaaatctatgtataccgccggcgccgtttcctaccaagtgttcggagaatttgctggcaacggtatctggaaaggggtcgattatggcgagaaagacttctatgtgtttgatattctgatcaatgcggaatcaggagacaacacgtacctgactgattatgaaatgcaggacttctgtaatgaatgtgggtttaagatggcaccaatgcttggtcgcggcacattcgatagcctgattatgattccgaacgatttcgattcggttctcatggcttacaatgcaacggcgaaagaggacctggtaaaagcgaacaactgcgtctttgatgccaatgtgatcggtgataacactgctgaaggctatgttcttaaaccgtgtgaacccaaatggttaccgaatgggacgcgtgtggcgatcaaatgcaagaactccaaattcagcgagaagaagaaaagtgacaaaccgatcaagacacaagtcccactgacggaaattgataagaatctgctggacgtattggcctgttatgtcactttaaaccgcgtgaacaacgtgatctctaagattggaacagtgacgccgcatgattttgagaaagtaatgtggctgactgttcaggatattctggaagaaacgtcacgtgagggtattgttctgacgacatcggacaatcctgacctcgtcaagaaagaacttgtccgcatggtgcaggatgtgttaaaatcggcatggcgcgaactggtgtcg

SEQ ID NO: 582 - protein, 343 aa, synthetic construct
  REGION 1..343: note = variant of RNA ligase 2 from Escherichia phage RB69 (Bacteriophage RB69)
MHHHHHHGGSGMFKKYSSLENHYNSKFIEKLYANGLTDGVWVAREKIHGTNFSLIIERDNVTCAKRTGPIKPTETFYGYEIVLKKYDKAIKTVQKSMYTAGAVSYQVFGEFAGNGIWKGVDYGEKDFYVFDILINAESGDNTYLTDYEMQDFCNECGFKMAPMLGRGTFDSLIMIPNDFDSVLMAYNATAKEDLVKANNCVFDANVIGDNTAEGYVLKPCEPKWLPNGTRVAIKCKNSKFSEKKKSDKPIKTQVPLTEIDKNLLDVLACYVTLNRVNNVISKIGTVTPHDFEKVMWLTVQDILEETSREGIVLTTSDNPDLVKKELVRMVQDVLKSAWRELVS

SEQ ID NO: 583 - DNA, 1029 bp, synthetic construct
  misc_feature 1..1029: note = variant of RNA ligase 2 from Escherichia phage RB69 (Bacteriophage RB69)
  source 1..1029: mol_type = other DNA
atgcatcaccatcaccatcacggtggcagcggtatgtttaagaaatattctagtctggaaaaccattacaatagcaaattcattgagaaactctatgctaacggcttaactgatggtgtatgggttgcgcgcgaaaagatccacgggacgaacttttcgctgattatcgagcgtgataatgtaacatgcgccaaacgtacaggcccgattaagcctaccgaaaccttctacggttatgaaatcgtcctgaagaaatacgataaagcgattaagacggtgcagaaatctatgtataccgccggcgccgtttcctaccaagtgttcggagaatttgctggcaacggtatctggaaaggggtcgattatggcgagaaagacttctatgtgtttgatattctgatcaatgcggaatcaggagacaacacgtacctgactgattatgaaatgcaggacttctgtaatgaatgtgggtttaagatggcaccaatgcttggtcgcggcacattcgatagcctgattatgattccgaacgatttcgattcggttctcatggcttacaatgcaacggcgaaagaggacctggtaaaagcgaacaacactgtctttgatgccaatgtgatcggtgataacactgctgaaggctatgttcttaaaccgtgtgaacccaaatggttaccgaatgggacgcgtgtggcgatcaaatgcaagaactccaaattcagcgagaagaagaaaagtgacaaaccgatcaagacacaagtcccactgacggaaattgataagaatctgctggacgtattggcctgttatgtcactttaaaccgcgtgaacaacgtgatctctaagattggaacagtgacgccgaaagattttgagaaagtaatgtggctgactgttcaggatattctggaagaaacgtcacgtgagggtattgttctgacgacatcggacaatcctgacctcgtcaagaaagaacttgtccgcatggtgcaggatgtgttaaaatcggcatggcgcgaactggtgtcg

SEQ ID NO: 584 - protein, 343 aa, synthetic construct
  REGION 1..343: note = variant of RNA ligase 2 from Escherichia phage RB69 (Bacteriophage RB69)
MHHHHHHGGSGMFKKYSSLENHYNSKFIEKLYANGLTDGVWVAREKIHGTNFSLIIERDNVTCAKRTGPIKPTETFYGYEIVLKKYDKAIKTVQKSMYTAGAVSYQVFGEFAGNGIWKGVDYGEKDFYVFDILINAESGDNTYLTDYEMQDFCNECGFKMAPMLGRGTFDSLIMIPNDFDSVLMAYNATAKEDLVKANNTVFDANVIGDNTAEGYVLKPCEPKWLPNGTRVAIKCKNSKFSEKKKSDKPIKTQVPLTEIDKNLLDVLACYVTLNRVNNVISKIGTVTPKDFEKVMWLTVQDILEETSREGIVLTTSDNPDLVKKELVRMVQDVLKSAWRELVS

SEQ ID NO: 585 - DNA, 1029 bp, synthetic construct
  misc_feature 1..1029: note = variant of RNA ligase 2 from Escherichia phage RB69 (Bacteriophage RB69)
  source 1..1029: mol_type = other DNA
atgcatcaccatcaccatcacggtggcagcggtatgtttaagaaatattctagtctggaaaaccattacaatagcaaattcattgagaaactctatgctaacggcttaactgatggtgtatgggttgcgcgcgaaaagatccacgggacgaacttttcgctgattatcgagcgtgataatgtaacatgcgccaaacgtacaggcccgattaagcctaccgaaaccttctacggttatgaaatcgtcctgaagaaatacgataaagcgattaagacggtgcaggtgtctatgtataccgccggcgccgtttcctaccaagtgttcggagaatttgctggcaacggtatctggaaaggggtcgattatggcgagaaagacttctatgtgtttgatattctgatcaatgcggaatcaggagacaacacgtacctgactgattatgaaatgcaggacttctgtaatgaatatgggtttaagatggcaccaatgcttggtcgcggcacattcgatagcctgattatgattccgaacgatttcgattcggttctcatggcttacaatgcaaccgcgaaagaggacctggtaaaagcgaacaactgcgtctttgatgccaatgtgatcggtgataacactgctgaaggctatgttcttaaaccgtgtgaacccaaatggttaccgaatgggacgcgtgtggcgatcaaatgcaagaactccaaattcagcgagaagaagaaaagtgacaaaccgatcaagacacaagtcccactgacggaaattgataagaatctgctggacgtattggcctgttatgtcactttaaaccgcgtgaacaacgtgatctctaagattggaacagtgacgccgcatgattttgagaaagtaatgtggctgactgttcaggatattctggaagaaacgtcacgtgagggtattgttctgacgacatcggacaatcctgacctcgtcaagaaagaacttgtccgcatggtgcaggatgtgttaaaatcgggctggcgcgaactggtgtcg

SEQ ID NO: 586 - protein, 343 aa, synthetic construct
  REGION 1..343: note = variant of RNA ligase 2 from Escherichia phage RB69 (Bacteriophage RB69)
MHHHHHHGGSGMFKKYSSLENHYNSKFIEKLYANGLTDGVWVAREKIHGTNFSLIIERDNVTCAKRTGPIKPTETFYGYEIVLKKYDKAIKTVQVSMYTAGAVSYQVFGEFAGNGIWKGVDYGEKDFYVFDILINAESGDNTYLTDYEMQDFCNEYGFKMAPMLGRGTFDSLIMIPNDFDSVLMAYNATAKEDLVKANNCVFDANVIGDNTAEGYVLKPCEPKWLPNGTRVAIKCKNSKFSEKKKSDKPIKTQVPLTEIDKNLLDVLACYVTLNRVNNVISKIGTVTPHDFEKVMWLTVQDILEETSREGIVLTTSDNPDLVKKELVRMVQDVLKSGWRELVS

SEQ ID NO: 587 - DNA, 1029 bp, synthetic construct
  misc_feature 1..1029: note = variant of RNA ligase 2 from Escherichia phage RB69 (Bacteriophage RB69)
  source 1..1029: mol_type = other DNA
atgcatcaccatcaccatcacggtggcagcggtatgtttaagaaatattctagtctggaaaaccattacaatagcaaattcattgagaaactctatgctaacggcttaactgatggtgtatgggttgcgcgcgaaaagatccacgggacgaacttttcgctgattatcgagcgtgataatgtaacatgcgccaaacgtacaggcccgattaagcctaccgaaaccttctacggttatgaaatcgtcctgaagaaatacgataaagcgattaagacggtgcagaaatctatgtataccgccggcgccgtttcctaccaagtgttcggagaatttgctggcaacggtatctggaaaggggtcgattatggcgagaaagacttctatgtgtttgatattctgatcaatgcggaatcaggagacaacacgtacctgactgattatgaaatgcaggacttctgtaatgaatgtgggtttaagatggcaccaatgcttggtcgcggcaccttcgatagcctgattatgattccgaacgatttcgattcggttctcatggcttacaatgcagtggcgaaagaggacctggtaaaagcgaacaacaccgtctttgatgccaatgtgatcggtgataacactgctgaaggctatgttcttaaaccgtgtgaacccaaatggttaccgaatgggacgcgtgtggcgatcaaatgcaagaactccaaattcagcgagaagaagaaaagtgacaaaccgatcaagacacaagtcccactgacggaaattgataagaatctgctggacgtattggcctgttatattactttaaaccgcgtgaacaacgtgatctctaagattggaacagtgacgccgcatgattttgagaaagtaatgtggctgactgttcaggatattctggaagaaacgtcacgtgagggtattgttctgacgacatcggacaatcctgacctcgtcaagaaagaacttgtccgcatggtgcaggatgtgttaaaatcggcatggcgcgaactggtgtcg

SEQ ID NO: 588 - protein, 343 aa, synthetic construct
  REGION 1..343: note = variant of RNA ligase 2 from Escherichia phage RB69 (Bacteriophage RB69)
MHHHHHHGGSGMFKKYSSLENHYNSKFIEKLYANGLTDGVWVAREKIHGTNFSLIIERDNVTCAKRTGPIKPTETFYGYEIVLKKYDKAIKTVQKSMYTAGAVSYQVFGEFAGNGIWKGVDYGEKDFYVFDILINAESGDNTYLTDYEMQDFCNECGFKMAPMLGRGTFDSLIMIPNDFDSVLMAYNAVAKEDLVKANNTVFDANVIGDNTAEGYVLKPCEPKWLPNGTRVAIKCKNSKFSEKKKSDKPIKTQVPLTEIDKNLLDVLACYITLNRVNNVISKIGTVTPHDFEKVMWLTVQDILEETSREGIVLTTSDNPDLVKKELVRMVQDVLKSAWRELVS

SEQ ID NO: 589 - DNA, 1029 bp, synthetic construct
  misc_feature 1..1029: note = variant of RNA ligase 2 from Escherichia phage RB69 (Bacteriophage RB69)
  source 1..1029: mol_type = other DNA
atgcatcaccatcaccatcacggtggcagcggtatgtttaagaaatattctagtctggaaaaccattacaatagcaaattcattgagaaactctatgctaacggcttaactgatggtgtatgggttgcgcgcgaaaagatccacgggacgaacttttcgctgattatcgagcgtgataatgtaacatgcgccaaacgtacaggcccgattaagcctaccgaaaccttctacggttatgaaatcgtcctgaagaaatacgataaagcgattaagacggtgcagaaatctatgtataccgccggcgccgtttcctaccaagtgttcggagaatttgctggcaacggtatctggaaaggggtcgattatggcgagaaagacttctatgtgtttgatattctgatcaatgcggaatcaggagacaacacgtacctgactgattatgaaatgcaggacttctgtaatgaatgtgggtttaagatggcaccaatgcttggtcgcggcaccttcgatagcctgattatgattccgaacgatttcgattcggttctcatggcttacaatgcaaccgcgaaagaggacctggtaaaagcgaacaacagcgtctttgatgccaatgtgatcggtgataacactgctgaaggctatgttcttaaaccgtgtgaacccaaatggttaccgaatgggacgcgtgtggcgatcaaatgcaagaactccaaattcagcgagaagaagaaaagtgacaaaccgatcaagacacaagtcccactgacggaaattgataagaatctgctggacgtattggcctgttatattactttaaaccgcgtgaacaacgtgatctctaagattggaacagtgacgccggccgattttgagaaagtaatgtggctgactgttcaggatattctggaagaaacgtcacgtgagggtattgttctgacgacatcggacaatcctgacctcgtcaagaaagaacttgtccgcatggtgcaggatgtgttaaaatcgggctggcgcgaactggtgtcg

SEQ ID NO: 590 - protein, 343 aa, synthetic construct
  REGION 1..343: note = variant of RNA ligase 2 from Escherichia phage RB69 (Bacteriophage RB69)
MHHHHHHGGSGMFKKYSSLENHYNSKFIEKLYANGLTDGVWVAREKIHGTNFSLIIERDNVTCAKRTGPIKPTETFYGYEIVLKKYDKAIKTVQKSMYTAGAVSYQVFGEFAGNGIWKGVDYGEKDFYVFDILINAESGDNTYLTDYEMQDFCNECGFKMAPMLGRGTFDSLIMIPNDFDSVLMAYNATAKEDLVKANNSVFDANVIGDNTAEGYVLKPCEPKWLPNGTRVAIKCKNSKFSEKKKSDKPIKTQVPLTEIDKNLLDVLACYITLNRVNNVISKIGTVTPADFEKVMWLTVQDILEETSREGIVLTTSDNPDLVKKELVRMVQDVLKSGWRELVS

SEQ ID NO: 591 - DNA, 1029 bp, synthetic construct
  misc_feature 1..1029: note = variant of RNA ligase 2 from Escherichia phage RB69 (Bacteriophage RB69)
  source 1..1029: mol_type = other DNA
atgcatcaccatcaccatcacggtggcagcggtatgtttaagaaatattctagtctggaaaaccattacaatagcaaattcattgagaaactctatgctaacggcttaactgatggtgtatgggttgcgcgcgaaaagatccacgggacgaacttttcgctgattatcgagcgtgataatgtaacatgcgccaaacgtacaggcccgattaagcctaccgaaaccttctacggttatgaaatcgtcctgaagaaatacgataaagcgattaagacggtgcagaaatctatgtataccgccggcgccgtttcctaccaagtgttcggagaatttgctggcaacggtatctggaaaggggtcgattatggcgagaaagacttctatgtgtttgatattctgatcaatgcggaatcaggagacaacacgtacctgactgattatgaaatgcaggacttctgtaatgaatgtgggtttaagatggcaccaatgcttggtcgcggcaccttcgatagcctgattatgattccgaacgatttcgattcggttctcatggcttacaatgcaacggcgaaagaggacctggtaaaagcgaacaacaccgtctttgatgccaatgtgatcggtgataacactgctgaaggctatgttcttaaaccgtgtgaacccaaatggttaccgaatgggacgcgtgtggcgatcaaatgcaagaactccaaattcagcgagaagaagaaaagtgacaaaccgatcaagacacaagtcccactgacggaaattgataagaatctgctggacgtattggcctgttatattactttaaaccgcgtgaacaacgtgatctctaagattggaacagtgacgccggccgattttgagaaagtaatgtggctgactgttcaggatattctggaagaaacgtcacgtgagggtattgttctgacgacatcggacaatcctgacctcgtcaagaaagaacttgtccgcatggtgcaggatgtgttaaaatcggcctggcgcgaactggtgtcg

SEQ ID NO: 592 - protein, 343 aa, synthetic construct
  REGION 1..343: note = variant of RNA ligase 2 from Escherichia phage RB69 (Bacteriophage RB69)
MHHHHHHGGSGMFKKYSSLENHYNSKFIEKLYANGLTDGVWVAREKIHGTNFSLIIERDNVTCAKRTGPIKPTETFYGYEIVLKKYDKAIKTVQKSMYTAGAVSYQVFGEFAGNGIWKGVDYGEKDFYVFDILINAESGDNTYLTDYEMQDFCNECGFKMAPMLGRGTFDSLIMIPNDFDSVLMAYNATAKEDLVKANNTVFDANVIGDNTAEGYVLKPCEPKWLPNGTRVAIKCKNSKFSEKKKSDKPIKTQVPLTEIDKNLLDVLACYITLNRVNNVISKIGTVTPADFEKVMWLTVQDILEETSREGIVLTTSDNPDLVKKELVRMVQDVLKSAWRELVS

SEQ ID NO: 593 - DNA, 1029 bp, synthetic construct
  misc_feature 1..1029: note = variant of RNA ligase 2 from Escherichia phage RB69 (Bacteriophage RB69)
  source 1..1029: mol_type = other DNA
atgcatcaccatcaccatcacggtggcagcggtatgtttaagaaatattctagtctggaaaaccattacaatagcaaattcattgagaaactctatgctaacggcttaactgatggtgtatgggttgcgcgcgaaaagatccacgggacgaacttttcgctgattatcgagcgtgataatgtaacatgcgccaaacgtacaggcccgattaagcctaccgaaaccttctacggttatgaaatcgtcctgaagaaatacgataaagcgattaagacggtgcagaaatctatgtataccgccggcgccgtttcctaccaagtgttcggagaatttgctggcaacggtatctggaaaggggtcgattatggcgagaaagacttctatgtgtttgatattctgatcaatgcggaatcaggagacaacacgtacctgactgattatgaaatgcaggacttctgtaatgaatgtgggtttaagatggcaccaatgcttggtcgcggcacattcgatagcctgattatgattccgaacgatttcgattcggttctcatggcttacaatgcagtggcgaaagaggacctggtaaaagcgaacaacagcgtctttgatgccaatgtgatcggtgataacactgctgaaggctatgttcttaaaccgtgtgaacccaaatggttaccgaatgggacgcgtgtggcgatcaaatgcaagaactccaaattcagcgagaagaagaaaagtgacaaaccgatcaagacacaagtcccactgacggaaattgataagaatctgctggacgtattggcctgttatgtcactttaaaccgcgtgaacaacgtgatctctaagattggaacagtgacgccgcatgattttgagaaagtaatgtggctgactgttcaggatattctggaagaaacgtcacgtgagggtattgttctgacgacatcggacaatcctgacctcgtcaagaaagaacttgtccgcatggtgcaggatgtgttaaaatcggcatggcgcgaactggtgtcg

SEQ ID NO: 594 - protein, 343 aa, synthetic construct
  REGION 1..343: note = variant of RNA ligase 2 from Escherichia phage RB69 (Bacteriophage RB69)
MHHHHHHGGSGMFKKYSSLENHYNSKFIEKLYANGLTDGVWVAREKIHGTNFSLIIERDNVTCAKRTGPIKPTETFYGYEIVLKKYDKAIKTVQKSMYTAGAVSYQVFGEFAGNGIWKGVDYGEKDFYVFDILINAESGDNTYLTDYEMQDFCNECGFKMAPMLGRGTFDSLIMIPNDFDSVLMAYNAVAKEDLVKANNSVFDANVIGDNTAEGYVLKPCEPKWLPNGTRVAIKCKNSKFSEKKKSDKPIKTQVPLTEIDKNLLDVLACYVTLNRVNNVISKIGTVTPHDFEKVMWLTVQDILEETSREGIVLTTSDNPDLVKKELVRMVQDVLKSAWRELVS

SEQ ID NO: 595 - DNA, 1029 bp, synthetic construct
  misc_feature 1..1029: note = variant of RNA ligase 2 from Escherichia phage RB69 (Bacteriophage RB69)
  source 1..1029: mol_type = other DNA
atgcatcaccatcaccatcacggtggcagcggtatgtttaagaaatattctagtctggaaaaccattacaatagcaaattcattgagaaactctatgctaacggcttaactgatggtgtatgggttgcgcgcgaaaagatccacgggacgaacttttcgctgattatcgagcgtgataatgtaacatgcgccaaacgtacaggcccgattaagcctaccgaaaccttctacggttatgaaatcgtcctgaagaaatacgataaagcgattaagacggtgcagaaatctatgtataccgccggcgccgtttcctaccaagtgttcggagaatttgctggcaacggtatctggaaaggggtcgattatggcgagaaagacttctatgtgtttgatattctgatcaatgcggaatcaggagacaacacgtacctgactgattatgaaatgcaggacttctgtaatgaatatgggtttaagatggcaccaatgcttggtcgcggcacattcgatagcctgattatgattccgaacgatttcgattcggttctcatggcttacaatgcaaccgcgaaagaggacctggtaaaagcgaacaacagcgtctttgatgccaatgtgatcggtgataacactgctgaaggctatgttcttaaaccgtgtgaacccaaatggttaccgaatgggacgcgtgtggcgatcaaatgcaagaactccaaattcagcgagaagaagaaaagtgacaaaccgatcaagacacaagtcccactgacggaaattgataagaatctgctggacgtattggcctgttatgttactttaaaccgcgtgaacaacgtgatctctaagattggaacagtgacgccgaccgattttgagaaagtaatgtggctgactgttcaggatattctggaagaaacgtcacgtgagggtattgttctgacgacatcggacaatcctgacctcgtcaagaaagaacttgtccgcatggtgcaggatgtgttaaaatcggcatggcgcgaactggtgtcg

SEQ ID NO: 596 - protein, 343 aa, synthetic construct
  REGION 1..343: note = variant of RNA ligase 2 from Escherichia phage RB69 (Bacteriophage RB69)
MHHHHHHGGSGMFKKYSSLENHYNSKFIEKLYANGLTDGVWVAREKIHGTNFSLIIERDNVTCAKRTGPIKPTETFYGYEIVLKKYDKAIKTVQKSMYTAGAVSYQVFGEFAGNGIWKGVDYGEKDFYVFDILINAESGDNTYLTDYEMQDFCNEYGFKMAPMLGRGTFDSLIMIPNDFDSVLMAYNATAKEDLVKANNSVFDANVIGDNTAEGYVLKPCEPKWLPNGTRVAIKCKNSKFSEKKKSDKPIKTQVPLTEIDKNLLDVLACYVTLNRVNNVISKIGTVTPTDFEKVMWLTVQDILEETSREGIVLTTSDNPDLVKKELVRMVQDVLKSAWRELVS

SEQ ID NO: 597 - DNA, 1029 bp, synthetic construct
  misc_feature 1..1029: note = variant of RNA ligase 2 from Escherichia phage RB69 (Bacteriophage RB69)
  source 1..1029: mol_type = other DNA
atgcatcaccatcaccatcacggtggcagcggtatgtttaagaaatattctagtctggaaaaccattacaatagcaaattcattgagaaactctatgctaacggcttaactgatggtgtatgggttgcgcgcgaaaagatccacgggacgaacttttcgctgattatcgagcgtgataatgtaacatgcgccaaacgtacaggcccgattaagcctaccgaaaccttctacggttatgaaatcgtcctgaagaaatacgataaagcgattaagacggtgcagaaatctatgtataccgccggcgccgtttcctaccaagtgttcggagaatttgctggcaacggtatctggaaaggggtcgattatggcgagaaagacttctatgtgtttgatattctgatcaatgcggaatcaggagacaacacgtacctgactgattatgaaatgcaggacttctgtaatgaatttgggtttaagatggcaccaatgcttggtcgcggcgccttcgatagcctgattatgattccgaacgatttcgattcggttctcatggcttacaatgcagtggcgaaagaggacctggtaaaagcgaacaactgcgtctttgatgccaatgtgatcggtgataacactgctgaaggctatgttcttaaaccgtgtgaacccaaatggttaccgaatgggacgcgtgtggcgatcaaatgcaagaactccaaattcagcgagaagaagaaaagtgacaaaccgatcaagacacaagtcccactgacggaaattgataagaatctgctggacgtattggcctgttatattactttaaaccgcgtgaacaacgtgatctctaagattggaacagtgacgccgcatgattttgagaaagtaatgtggctgactgttgaagatattctggaagaaacgtcacgtgagggtattgttctgacgacatcggacaatcctgacctcgtcaagaaagaacttgtccgcatggtgcaggatgtgttaaaatcggcctggcgcgaactggtgtcg

SEQ ID NO: 598 - protein, 343 aa, synthetic construct
  REGION 1..343: note = variant of RNA ligase 2 from Escherichia phage RB69 (Bacteriophage RB69)
MHHHHHHGGSGMFKKYSSLENHYNSKFIEKLYANGLTDGVWVAREKIHGTNFSLIIERDNVTCAKRTGPIKPTETFYGYEIVLKKYDKAIKTVQKSMYTAGAVSYQVFGEFAGNGIWKGVDYGEKDFYVFDILINAESGDNTYLTDYEMQDFCNEFGFKMAPMLGRGAFDSLIMIPNDFDSVLMAYNAVAKEDLVKANNCVFDANVIGDNTAEGYVLKPCEPKWLPNGTRVAIKCKNSKFSEKKKSDKPIKTQVPLTEIDKNLLDVLACYITLNRVNNVISKIGTVTPHDFEKVMWLTVEDILEETSREGIVLTTSDNPDLVKKELVRMVQDVLKSAWRELVS

SEQ ID NO: 599 - DNA, 1029 bp, synthetic construct
  misc_feature 1..1029: note = variant of RNA ligase 2 from Escherichia phage RB69 (Bacteriophage RB69)
  source 1..1029: mol_type = other DNA
atgcatcaccatcaccatcacggtggcagcggtatgtttaagaaatattctagtctggaaaaccattacaatagcaaattcattgagaaactctatgctaacggcttaactgatggtgtatgggttgcgcgcgaaaagatccacgggacgaacttttcgctgattatcgagcgtgataatgtaacatgcgccaaacgtacaggcccgattaagcctaccgaaaccttctacggttatgaaatcgtcctgaagaaatacgataaagcgattaagacggtgcagaaatctatgtataccgccggcgccgtttcctaccaagtgttcggagaatttgctggcaacggtatctggaaaggggtcgattatggcgagaaagacttctatgtgtttgatattctgatcaatgcggaatcaggagacaacacgtacctgactgattatgaaatgcaggacttctgtaatgaatatgggtttaagatggcaccaatgcttggtcgcggcacattcgatagcctgattatgattccgaacgatttcgattcggttctcatggcttacaatgcagtggcgaaagaggacctggtaaaagcgaacaacaccgtctttgatgccaatgtgatcggtgataacactgctgaaggctatgttcttaaaccgtgtgaacccaaatggttaccgaatgggacgcgtgtggcgatcaaatgcaagaactccaaattcagcgagaagaagaaaagtgacaaaccgatcaagacacaagtcccactgacggaaattgataagaatctgctggacgtattggcctgttatgtcactttaaaccgcgtgaacaacgtgatctctaagattggaacagtgacgccggccgattttgagaaagtaatgtggctgactgttcaggatattctggaagaaacgtcacgtgagggtattgttctgacgacatcggacaatcctgacctcgtcaagaaagaacttgtccgcatggtgcaggatgtgttaaaatcggcatggcgcgaactggtgtcg

SEQ ID NO: 600 - protein, 343 aa, synthetic construct
  REGION 1..343: note = variant of RNA ligase 2 from Escherichia phage RB69 (Bacteriophage RB69)
MHHHHHHGGSGMFKKYSSLENHYNSKFIEKLYANGLTDGVWVAREKIHGTNFSLIIERDNVTCAKRTGPIKPTETFYGYEIVLKKYDKAIKTVQKSMYTAGAVSYQVFGEFAGNGIWKGVDYGEKDFYVFDILINAESGDNTYLTDYEMQDFCNEYGFKMAPMLGRGTFDSLIMIPNDFDSVLMAYNAVAKEDLVKANNTVFDANVIGDNTAEGYVLKPCEPKWLPNGTRVAIKCKNSKFSEKKKSDKPIKTQVPLTEIDKNLLDVLACYVTLNRVNNVISKIGTVTPADFEKVMWLTVQDILEETSREGIVLTTSDNPDLVKKELVRMVQDVLKSAWRELVS

SEQ ID NO: 601 - DNA, 1029 bp, synthetic construct
  misc_feature 1..1029: note = variant of RNA ligase 2 from Escherichia phage RB69 (Bacteriophage RB69)
  source 1..1029: mol_type = other DNA
atgcatcaccatcaccatcacggtggcagcggtatgtttaagaaatattctagtctggaaaaccattacaatagcaaattcattgagaaactctatgctaacggcttaactgatggtgtatgggttgcgcgcgaaaagatccacgggacgaacttttcgctgattatcgagcgtgataatgtaacatgcgccaaacgtacaggcccgattaagcctaccgaaaccttctacggttatgaaatcgtcctgaagaaatacgataaagcgattaagacggtgcagaaatctatgtataccgccggcgccgtttcctaccaagtgttcggagaatttgctggcaacggtatctggaaaggggtcgattatggcgagaaagacttctatgtgtttgatattctgatcaatgcggaatcaggagacaacacgtacctgactgattatgaaatgcaggacttctgtaatgaatttgggtttaagatggcaccaatgcttggtcgcggcgccttcgatagcctgattatgattccgaacgatttcgattcggttctcatggcttacaatgcaacggcgaaagaggacctggtaaaagcgaacaactgcgtctttgatgccaatgtgatcggtgataacactgctgaaggctatgttcttaaaccgtgtgaacccaaatggttaccgaatgggacgcgtgtggcgatcaaatgcaagaactccaaattcagcgagaagaagaaaagtgacaaaccgatcaagacacaagtcccactgacggaaattgataagaatctgctggacgtattggcctgttatgtcactttaaaccgcgtgaacaacgtgatctctaagattggaacagtgacgccgaaagattttgagaaagtaatgtggctgactgttcaggatattctggaagaaacgtcacgtgagggtattgttctgacgacatcggacaatcctgacctcgtcaagaaagaacttgtccgcatggtgcaggatgtgttaaaatcggcatggcgcgaactggtgtcg

SEQ ID NO: 602 - protein, 343 aa, synthetic construct
  REGION 1..343: note = variant of RNA ligase 2 from Escherichia phage RB69 (Bacteriophage RB69)
MHHHHHHGGSGMFKKYSSLENHYNSKFIEKLYANGLTDGVWVAREKIHGTNFSLIIERDNVTCAKRTGPIKPTETFYGYEIVLKKYDKAIKTVQKSMYTAGAVSYQVFGEFAGNGIWKGVDYGEKDFYVFDILINAESGDNTYLTDYEMQDFCNEFGFKMAPMLGRGAFDSLIMIPNDFDSVLMAYNATAKEDLVKANNCVFDANVIGDNTAEGYVLKPCEPKWLPNGTRVAIKCKNSKFSEKKKSDKPIKTQVPLTEIDKNLLDVLACYVTLNRVNNVISKIGTVTPKDFEKVMWLTVQDILEETSREGIVLTTSDNPDLVKKELVRMVQDVLKSAWRELVS

SEQ ID NO: 603 - DNA, 1029 bp, synthetic construct
  misc_feature 1..1029: note = variant of RNA ligase 2 from Escherichia phage RB69 (Bacteriophage RB69)
  source 1..1029: mol_type = other DNA
atgcatcaccatcaccatcacggtggcagcggtatgtttaagaaatattctagtctggaaaaccattacaatagcaaattcattgagaaactctatgctaacggcttaactgatggtgtatgggttgcgcgcgaaaagatccacgggacgaacttttcgctgattatcgagcgtgataatgtaacatgcgccaaacgtacaggcccgattaagcctaccgaaaccttctacggttatgaaatcgtcctgaagaaatacgataaagcgattaagacggtgcaggtgtctatgtataccgccggcgccgtttcctaccaagtgttcggagaatttgctggcaacggtatctggaaaggggtcgattatggcgagaaagacttctatgtgtttgatattctgatcaatgcggaatcaggagacaacacgtacctgactgattatgaaatgcaggacttctgtaatgaatatgggtttaagatggcaccaatgcttggtcgcggcacattcgatagcctgattatgattccgaacgatttcgattcggttctcatggcttacaatgcaaccgcgaaagaggacctggtaaaagcgaacaactgcgtctttgatgccaatgtgatcggtgataacactgctgaaggctatgttcttaaaccgtgtgaacccaaatggttaccgaatgggacgcgtgtggcgatcaaatgcaagaactccaaattcagcgagaagaagaaaagtgacaaaccgatcaagacacaagtcccactgacggaaattgataagaatctgctggacgtattggcctgttatattactttaaaccgcgtgaacaacgtgatctctaagattggaacagtgacgccgaaagattttgagaaagtaatgtggctgactgttcaggatattctggaagaaacgtcacgtgagggtattgttctgacgacatcggacaatcctgacctcgtcaagaaagaacttgtccgcatggtgcaggatgtgttaaaatcggcatggcgcgaactggtgtcg

SEQ ID NO: 604 - protein, 343 aa, synthetic construct
  REGION 1..343: note = variant of RNA ligase 2 from Escherichia phage RB69 (Bacteriophage RB69)
MHHHHHHGGSGMFKKYSSLENHYNSKFIEKLYANGLTDGVWVAREKIHGTNFSLIIERDNVTCAKRTGPIKPTETFYGYEIVLKKYDKAIKTVQVSMYTAGAVSYQVFGEFAGNGIWKGVDYGEKDFYVFDILINAESGDNTYLTDYEMQDFCNEYGFKMAPMLGRGTFDSLIMIPNDFDSVLMAYNATAKEDLVKANNCVFDANVIGDNTAEGYVLKPCEPKWLPNGTRVAIKCKNSKFSEKKKSDKPIKTQVPLTEIDKNLLDVLACYITLNRVNNVISKIGTVTPKDFEKVMWLTVQDILEETSREGIVLTTSDNPDLVKKELVRMVQDVLKSAWRELVS

SEQ ID NO: 605 - DNA, 1029 bp, synthetic construct
  misc_feature 1..1029: note = variant of RNA ligase 2 from Escherichia phage RB69 (Bacteriophage RB69)
  source 1..1029: mol_type = other DNA
atgcatcaccatcaccatcacggtggcagcggtatgtttaagaaatattctagtctggaaaaccattacaatagcaaattcattgagaaactctatgctaacggcttaactgatggtgtatgggttgcgcgcgaaaagatccacgggacgaacttttcgctgattatcgagcgtgataatgtaacatgcgccaaacgtacaggcccgattaagcctaccgaaaccttctacggttatgaaatcgtcctgaagaaatacgataaagcgattaagacggtgcagaaatctatgtataccgccggcgccgtttcctaccaagtgttcggagaatttgctggcaacggtatctggaaaggggtcgattatggcgagaaagacttctatgtgtttgatattctgatcaatgcggaatcaggagacaacacgtacctgactgattatgaaatgcaggacttctgtaatgaatttgggtttaagatggcaccaatgcttggtcgcggcacattcgatagcctgattatgattccgaacgatttcgattcggttctcatggcttacaatgcaacggcgaaagaggacctggtaaaagcgaacaactgcgtctttgatgccaatgtgatcggtgataacactgctgaaggctatgttcttaaaccgtgtgaacccaaatggttaccgaatgggacgcgtgtggcgatcaaatgcaagaactccaaattcagcgagaagaagaaaagtgacaaaccgatcaagacacaagtcccactgacggaaattgataagaatctgctggacgtattggcctgttatgtcactttaaaccgcgtgaacaacgtgatctctaagattggaacagtgacgccgcatgattttgagaaagtaatgtggctgactgttcaggatattctggaagaaacgtcacgtgagggtattgttctgacgacatcggacaatcctgacctcgtcaagaaagaacttgtccgcatggtgcaggatgagttaaaatcggcctggcgcgaactggtgtcg

SEQ ID NO: 606 - protein, 343 aa, synthetic construct
  REGION 1..343: note = variant of RNA ligase 2 from Escherichia phage RB69 (Bacteriophage RB69)
MHHHHHHGGSGMFKKYSSLENHYNSKFIEKLYANGLTDGVWVAREKIHGTNFSLIIERDNVTCAKRTGPIKPTETFYGYEIVLKKYDKAIKTVQKSMYTAGAVSYQVFGEFAGNGIWKGVDYGEKDFYVFDILINAESGDNTYLTDYEMQDFCNEFGFKMAPMLGRGTFDSLIMIPNDFDSVLMAYNATAKEDLVKANNCVFDANVIGDNTAEGYVLKPCEPKWLPNGTRVAIKCKNSKFSEKKKSDKPIKTQVPLTEIDKNLLDVLACYVTLNRVNNVISKIGTVTPHDFEKVMWLTVQDILEETSREGIVLTTSDNPDLVKKELVRMVQDELKSAWRELVS

SEQ ID NO: 607 - DNA, 1029 bp, synthetic construct
  misc_feature 1..1029: note = variant of RNA ligase 2 from Escherichia phage RB69 (Bacteriophage RB69)
  source 1..1029: mol_type = other DNA
atgcatcaccatcaccatcacggtggcagcggtatgtttaagaaatattctagtctggaaaaccattacaatagcaaattcattgagaaactctatgctaacggcttaactgatggtgtatgggttgcgcgcgaaaagatccacgggacgaacttttcgctgattatcgagcgtgataatgtaacatgcgccaaacgtacaggcccgattaagcctaccgaaaccttctacggttatgaaatcgtcctgaagaaatacgataaagcgattaagacggtgcaggtgtctatgtataccgccggcgccgtttcctaccaagtgttcggagaatttgctggcaacggtatctggaaaggggtcgattatggcgagaaagacttctatgtgtttgatattctgatcaatgcggaatcaggagacaacacgtacctgactgattatgaaatgcaggacttctgtaatgaatgtgggtttaagatggcaccaatgcttggtcgcggcaccttcgatagcctgattatgattccgaacgatttcgattcggttctcatggcttacaatgcaaccgcgaaagaggacctggtaaaagcgaacaacaccgtctttgatgccaatgtgatcggtgataacactgctgaaggctatgttcttaaaccgtgtgaacccaaatggttaccgaatgggacgcgtgtggcgatcaaatgcaagaactccaaattcagcgagaagaagaaaagtgacaaaccgatcaagacacaagtcccactgacggaaattgataagaatctgctggacgtattggcctgttatgttactttaaaccgcgtgaacaacgtgatctctaagattggaacagtgacgccgaaagattttgagaaagtaatgtggctgactgttcaggatattctggaagaaacgtcacgtgagggtattgttctgacgacatcggacaatcctgacctcgtcaagaaagaacttgtccgcatggtgcaggatgtgttaaaatcgggctggcgcgaactggtgtcg

SEQ ID NO: 608 - protein, 343 aa, synthetic construct
  REGION 1..343: note = variant of RNA ligase 2 from Escherichia phage RB69 (Bacteriophage RB69)
MHHHHHHGGSGMFKKYSSLENHYNSKFIEKLYANGLTDGVWVAREKIHGTNFSLIIERDNVTCAKRTGPIKPTETFYGYEIVLKKYDKAIKTVQVSMYTAGAVSYQVFGEFAGNGIWKGVDYGEKDFYVFDILINAESGDNTYLTDYEMQDFCNECGFKMAPMLGRGTFDSLIMIPNDFDSVLMAYNATAKEDLVKANNTVFDANVIGDNTAEGYVLKPCEPKWLPNGTRVAIKCKNSKFSEKKKSDKPIKTQVPLTEIDKNLLDVLACYVTLNRVNNVISKIGTVTPKDFEKVMWLTVQDILEETSREGIVLTTSDNPDLVKKELVRMVQDVLKSGWRELVS

SEQ ID NO: 609 - DNA, 1029 bp, synthetic construct
  misc_feature 1..1029: note = variant of RNA ligase 2 from Escherichia phage RB69 (Bacteriophage RB69)
  source 1..1029: mol_type = other DNA
atgcatcaccatcaccatcacggtggcagcggtatgtttaagaaatattctagtctggaaaaccattacaatagcaaattcattgagaaactctatgctaacggcttaactgatggtgtatgggttgcgcgcgaaaagatccacgggacgaacttttcgctgattatcgagcgtgataatgtaacatgcgccaaacgtacaggcccgattaagcctaccgaaaccttctacggttatgaaatcgtcctgaagaaatacgataaagcgattaagacggtgcagaaatctatgtataccgccggcgccgtttcctaccaagtgttcggagaatttgctggcaacggtatctggaaaggggtcgattatggcgagaaagacttctatgtgtttgatattctgatcaatgcggaatcaggagacaacacgtacctgactgattatgaaatgcaggacttctgtaatgaatgtgggtttaagatggcaccaatgcttggtcgcggcgccttcgatagcctgattatgattccgaacgatttcgattcggttctcatggcttacaatgcaaccgcgaaagaggacctggtaaaagcgaacaacagcgtctttgatgccaatgtgatcggtgataacactgctgaaggctatgttcttaaaccgtgtgaacccaaatggttaccgaatgggacgcgtgtggcgatcaaatgcaagaactccaaattcagcgagaagaagaaaagtgacaaaccgatcaagacacaagtcccactgacggaaattgataagaatctgctggacgtattggcctgttatgtcactttaaaccgcgtgaacaacgtgatctctaagattggaacagtgacgccggccgattttgagaaagtaatgtggctgactgttcaggatattctggaagaaacgtcacgtgagggtattgttctgacgacatcggacaatcctgacctcgtcaagaaagaacttgtccgcatggtgcaggatgtgttaaaatcggcctggcgcgaactggtgtcg

SEQ ID NO: 610 - protein, 343 aa, synthetic construct
  REGION 1..343: note = variant of RNA ligase 2 from Escherichia phage RB69 (Bacteriophage RB69)
MHHHHHHGGSGMFKKYSSLENHYNSKFIEKLYANGLTDGVWVAREKIHGTNFSLIIERDNVTCAKRTGPIKPTETFYGYEIVLKKYDKAIKTVQKSMYTAGAVSYQVFGEFAGNGIWKGVDYGEKDFYVFDILINAESGDNTYLTDYEMQDFCNECGFKMAPMLGRGAFDSLIMIPNDFDSVLMAYNATAKEDLVKANNSVFDANVIGDNTAEGYVLKPCEPKWLPNGTRVAIKCKNSKFSEKKKSDKPIKTQVPLTEIDKNLLDVLACYVTLNRVNNVISKIGTVTPADFEKVMWLTVQDILEETSREGIVLTTSDNPDLVKKELVRMVQDVLKSAWRELVS

SEQ ID NO: 611 - DNA, 1029 bp, synthetic construct
  misc_feature 1..1029: note = variant of RNA ligase 2 from Escherichia phage RB69 (Bacteriophage RB69)
  source 1..1029: mol_type = other DNA
atgcatcaccatcaccatcacggtggcagcggtatgtttaagaaatattctagtctggaaaaccattacaatagcaaattcattgagaaactctatgctaacggcttaactgatggtgtatgggttgcgcgcgaaaagatccacgggacgaacttttcgctgattatcgagcgtgataatgtaacatgcgccaaacgtacaggcccgattaagcctaccgaaaccttctacggttatgaaatcgtcctgaagaaatacgataaagcgattaagacggtgcagaaatctatgtataccgccggcgccgtttcctaccaagtgttcggagaatttgctggcaacggtatctggaaaggggtcgattatggcgagaaagacttctatgtgtttgatattctgatcaatgcggaatcaggagacaacacgtacctgactgattatgaaatgcaggacttctgtaatgaatgtgggtttaagatggcaccaatgcttggtcgcggcaccttcgatagcctgattatgattccgaacgatttcgattcggttctcatggcttacaatgcagtggcgaaagaggacctggtaaaagcgaacaacaccgtctttgatgccaatgtgatcggtgataacactgctgaaggctatgttcttaaaccgtgtgaacccaaatggttaccgaatgggacgcgtgtggcgatcaaatgcaagaactccaaattcagcgagaagaagaaaagtgacaaaccgatcaagacacaagtcccactgacggaaattgataagaatctgctggacgtattggcctgttatgtcactttaaaccgcgtgaacaacgtgatctctaagattggaacagtgacgccgaaagattttgagaaagtaatgtggctgactgttcaggatattctggaagaaacgtcacgtgagggtattgttctgacgacatcggacaatcctgacctcgtcaagaaagaacttgtccgcatggtgcaggatgtgttaaaatcggcatggcgcgaactggtgtcg

SEQ ID NO: 612 - protein, 343 aa, synthetic construct
  REGION 1..343: note = variant of RNA ligase 2 from Escherichia phage RB69 (Bacteriophage RB69)
MHHHHHHGGSGMFKKYSSLENHYNSKFIEKLYANGLTDGVWVAREKIHGTNFSLIIERDNVTCAKRTGPIKPTETFYGYEIVLKKYDKAIKTVQKSMYTAGAVSYQVFGEFAGNGIWKGVDYGEKDFYVFDILINAESGDNTYLTDYEMQDFCNECGFKMAPMLGRGTFDSLIMIPNDFDSVLMAYNAVAKEDLVKANNTVFDANVIGDNTAEGYVLKPCEPKWLPNGTRVAIKCKNSKFSEKKKSDKPIKTQVPLTEIDKNLLDVLACYVTLNRVNNVISKIGTVTPKDFEKVMWLTVQDILEETSREGIVLTTSDNPDLVKKELVRMVQDVLKSAWRELVS

SEQ ID NO: 613 - DNA, 1029 bp, synthetic construct
  misc_feature 1..1029: note = variant of RNA ligase 2 from Escherichia phage RB69 (Bacteriophage RB69)
  source 1..1029: mol_type = other DNA
atgcatcaccatcaccatcacggtggcagcggtatgtttaagaaatattctagtctggaaaaccattacaatagcaaattcattgagaaactctatgctaacggcttaactgatggtgtatgggttgcgcgcgaaaagatccacgggacgaacttttcgctgattatcgagcgtgataatgtaacatgcgccaaacgtacaggcccgattaagcctaccgaaaccttctacggttatgaaatcgtcctgaagaaatacgataaagcgattaagacggtgcagaaatctatgtataccgccggcgccgtttcctaccaagtgttcggagaatttgctggcaacggtatctggaaaggggtcgattatggcgagaaagacttctatgtgtttgatattctgatcaatgcggaatcaggagacaacacgtacctgactgattatgaaatgcaggacttctgtaatgaatgtgggtttaagatggcaccaatgcttggtcgcggcacattcgatagcctgattatgattccgaacgatttcgattcggttctcatggcttacaatgcaaccgcgaaagaggacctggtaaaagcgaacaactgcgtctttgatgccaatgtgatcggtgataacactgctgaaggctatgttcttaaaccgtgtgaacccaaatggttaccgaatgggacgcgtgtggcgatcaaatgcaagaactccaaattcagcgagaagaagaaaagtgacaaaccgatcaagacacaagtcccactgacggaaattgataagaatctgctggacgtattggcctgttatgtcactttaaaccgcgtgaacaacgtgatctctaagattggaacagtgacgccgcatgattttgagaaagtaatgtggctgactgttcaggatattctggaagaaacgtcacgtgagggtattgttctgacgacatcggacaatcctgacctcgtcaagaaagaacttgtccgcatggtgcaggatgagttaaaatcgggctggcgcgaactggtgtcg

SEQ ID NO: 614 - protein, 343 aa, synthetic construct
  REGION 1..343: note = variant of RNA ligase 2 from Escherichia phage RB69 (Bacteriophage RB69)
MHHHHHHGGSGMFKKYSSLENHYNSKFIEKLYANGLTDGVWVAREKIHGTNFSLIIERDNVTCAKRTGPIKPTETFYGYEIVLKKYDKAIKTVQKSMYTAGAVSYQVFGEFAGNGIWKGVDYGEKDFYVFDILINAESGDNTYLTDYEMQDFCNECGFKMAPMLGRGTFDSLIMIPNDFDSVLMAYNATAKEDLVKANNCVFDANVIGDNTAEGYVLKPCEPKWLPNGTRVAIKCKNSKFSEKKKSDKPIKTQVPLTEIDKNLLDVLACYVTLNRVNNVISKIGTVTPHDFEKVMWLTVQDILEETSREGIVLTTSDNPDLVKKELVRMVQDELKSGWRELVS

SEQ ID NO: 615 - DNA, 1029 bp, synthetic construct
  misc_feature 1..1029: note = variant of RNA ligase 2 from Escherichia phage RB69 (Bacteriophage RB69)
  source 1..1029: mol_type = other DNA
atgcatcaccatcaccatcacggtggcagcggtatgtttaagaaatattctagtctggaaaaccattacaatagcaaattcattgagaaactctatgctaacggcttaactgatggtgtatgggttgcgcgcgaaaagatccacgggacgaacttttcgctgattatcgagcgtgataatgtaacatgcgccaaacgtacaggcccgattaagcctaccgaaaccttctacggttatgaaatcgtcctgaagaaatacgataaagcgattaagacggtgcagaaatctatgtataccgccggcgccatttcctaccaagtgttcggagaatttgctggcaacggtatctggaaaggggtcgattatggcgagaaagacttctatgtgtttgatattctgatcaatgcggaatcaggagacaacacgtacctgactgattatgaaatgcaggacttctgtaatgaatttgggtttaagatggcaccaatgcttggtcgcggcaccttcgatagcctgattatgattccgaacgatttcgattcggttctcatggcttacaatgcaaccgcgaaagaggacctggtaaaagcgaacaactgcgtctttgatgccaatgtgatcggtgataacactgctgaaggctatgttcttaaaccgtgtgaacccaaatggttaccgaatgggacgcgtgtggcgatcaaatgcaagaactccaaattcagcgagaagaagaaaagtgacaaaccgatcaagacacaagtcccactgacggaaattgataagaatctgctggacgtattggcctgttatattactttaaaccgcgtgaacaacgtgatctctaagattggaacagtgacgccgcatgattttgagaaagtaatgtggctgactgttcaagatattctggaagaaacgtcacgtgagggtattgttctgacgacatcggacaatcctgacctcgtcaagaaagaacttgtccgcatggtgcaggatgtgttaaaatcggcctggcgcgaactggtgtcg

SEQ ID NO: 616 - protein, 343 aa, synthetic construct
  REGION 1..343: note = variant of RNA ligase 2 from Escherichia phage RB69 (Bacteriophage RB69)
MHHHHHHGGSGMFKKYSSLENHYNSKFIEKLYANGLTDGVWVAREKIHGTNFSLIIERDNVTCAKRTGPIKPTETFYGYEIVLKKYDKAIKTVQKSMYTAGAISYQVFGEFAGNGIWKGVDYGEKDFYVFDILINAESGDNTYLTDYEMQDFCNEFGFKMAPMLGRGTFDSLIMIPNDFDSVLMAYNATAKEDLVKANNCVFDANVIGDNTAEGYVLKPCEPKWLPNGTRVAIKCKNSKFSEKKKSDKPIKTQVPLTEIDKNLLDVLACYITLNRVNNVISKIGTVTPHDFEKVMWLTVQDILEETSREGIVLTTSDNPDLVKKELVRMVQDVLKSAWRELVS

SEQ ID NO: 617 - DNA, 1029 bp, synthetic construct
  misc_feature 1..1029: note = variant of RNA ligase 2 from Escherichia phage RB69 (Bacteriophage RB69)
  source 1..1029: mol_type = other DNA
atgcatcaccatcaccatcacggtggcagcggtatgtttaagaaatattctagtctggaaaaccattacaatagcaaattcattgagaaactctatgctaacggcttaactgatggtgtatgggttgcgcgcgaaaagatccacgggacgaacttttcgctgattatcgagcgtgataatgtaacatgcgccaaacgtacaggcccgattaagcctaccgaaaccttctacggttatgaaatcgtcctgaagaaatacgataaagcgattaagacggtgcaggtgtctatgtataccgccggcgccgtttcctaccaagtgttcggagaatttgctggcaacggtatctggaaaggggtcgattatggcgagaaagacttctatgtgtttgatattctgatcaatgcggaatcaggagacaacacgtacctgactgattatgaaatgcaggacttctgtaatgaatttgggtttaagatggcaccaatgcttggtcgcggcaccttcgatagcctgattatgattccgaacgatttcgattcggttctcatggcttacaatgcaaccgcgaaagaggacctggtaaaagcgaacaacagcgtctttgatgccaatgtgatcggtgataacactgctgaaggctatgttcttaaaccgtgtgaacccaaatggttaccgaatgggacgcgtgtggcgatcaaatgcaagaactccaaattcagcgagaagaagaaaagtgacaaaccgatcaagacacaagtcccactgacggaaattgataagaatctgctggacgtattggcctgttatgtcactttaaaccgcgtgaacaacgtgatctctaagattggaacagtgacgccgcatgattttgagaaagtaatgtggctgactgttgaagatattctggaagaaacgtcacgtgagggtattgttctgacgacatcggacaatcctgacctcgtcaagaaagaacttgtccgcatggtgcaggatgagttaaaatcggcctggcgcgaactggtgtcg

SEQ ID NO: 618 - protein, 343 aa, synthetic construct
  REGION 1..343: note = variant of RNA ligase 2 from Escherichia phage RB69 (Bacteriophage RB69)
MHHHHHHGGSGMFKKYSSLENHYNSKFIEKLYANGLTDGVWVAREKIHGTNFSLIIERDNVTCAKRTGPIKPTETFYGYEIVLKKYDKAIKTVQVSMYTAGAVSYQVFGEFAGNGIWKGVDYGEKDFYVFDILINAESGDNTYLTDYEMQDFCNEFGFKMAPMLGRGTFDSLIMIPNDFDSVLMAYNATAKEDLVKANNSVFDANVIGDNTAEGYVLKPCEPKWLPNGTRVAIKCKNSKFSEKKKSDKPIKTQVPLTEIDKNLLDVLACYVTLNRVNNVISKIGTVTPHDFEKVMWLTVEDILEETSREGIVLTTSDNPDLVKKELVRMVQDELKSAWRELVS

SEQ ID NO: 619 - DNA, 1029 bp, synthetic construct
  misc_feature 1..1029: note = variant of RNA ligase 2 from Escherichia phage RB69 (Bacteriophage RB69)
  source 1..1029: mol_type = other DNA
atgcatcaccatcaccatcacggtggcagcggtatgtttaagaaatattctagtctggaaaaccattacaatagcaaattcattgagaaactctatgctaacggcttaactgatggtgtatgggttgcgcgcgaaaagatccacgggacgaacttttcgctgattatcgagcgtgataatgtaacatgcgccaaacgtacaggcccgattaagcctaccgaaaccttctacggttatgaaatcgtcctgaagaaatacgataaagcgattaagacggtgcagaaatctatgtataccgccggcgccgtttcctaccaagtgttcggagaatttgctggcaacggtatctggaaaggggtcgattatggcgagaaagacttctatgtgtttgatattctgatcaatgcggaatcaggagacaacacgtacctgactgattatgaaatgcaggacttctgtaatgaatttgggtttaagatggcaccaatgcttggtcgcggcaccttcgatagcctgattatgattccgaacgatttcgattcggttctcatggcttacaatgcaaccgcgaaagaggacctggtaaaagcgaacaactgcgtctttgatgccaatgtgatcggtgataacactgctgaaggctatgttcttaaaccgtgtgaacccaaatggttaccgaatgggacgcgtgtggcgatcaaatgcaagaactccaaattcagcgagaagaagaaaagtgacaaaccgatcaagacacaagtcccactgacggaaattgataagaatctgctggacgtattggcctgttatattactttaaaccgcgtgaacaacgtgatctctaagattggaacagtgacgccgaccgattttgagaaagtaatgtggctgactgttcaagatattctggaagaaacgtcacgtgagggtattgttctgacgacatcggacaatcctgacctcgtcaagaaagaacttgtccgcatggtgcaggatgagttaaaatcggcctggcgcgaactggtgtcg

SEQ ID NO: 620 - protein, 343 aa, synthetic construct
  REGION 1..343: note = variant of RNA ligase 2 from Escherichia phage RB69 (Bacteriophage RB69)
MHHHHHHGGSGMFKKYSSLENHYNSKFIEKLYANGLTDGVWVAREKIHGTNFSLIIERDNVTCAKRTGPIKPTETFYGYEIVLKKYDKAIKTVQKSMYTAGAVSYQVFGEFAGNGIWKGVDYGEKDFYVFDILINAESGDNTYLTDYEMQDFCNEFGFKMAPMLGRGTFDSLIMIPNDFDSVLMAYNATAKEDLVKANNCVFDANVIGDNTAEGYVLKPCEPKWLPNGTRVAIKCKNSKFSEKKKSDKPIKTQVPLTEIDKNLLDVLACYITLNRVNNVISKIGTVTPTDFEKVMWLTVQDILEETSREGIVLTTSDNPDLVKKELVRMVQDELKSAWRELVS

SEQ ID NO: 621 - DNA, 1029 bp, synthetic construct
  misc_feature 1..1029: note = variant of RNA ligase 2 from Escherichia phage RB69 (Bacteriophage RB69)
  source 1..1029: mol_type = other DNA
atgcatcaccatcaccatcacggtggcagcggtatgtttaagaaatattctagtctggaaaaccattacaatagcaaattcattgagaaactctatgctaacggcttaactgatggtgtatgggttgcgcgcgaaaagatccacgggacgaacttttcgctgattatcgagcgcgataatgtaacatgcgccaaacgtacaggcccgattaagcctaccgaaaccttctacggttatgaaatcgtcctgaagaaatacgataaagcgattaagacggtgcaggtgtctatgtataccgccggcgccgtttcctaccaagtgttcggagaatttgctggcaacggtatctggaaaggggtcgattatggcgagaaagacttctatgtgtttgatattctgatcaatgcggaatcaggagacaacacgtacctgactgattatgaaatgcaggacttctgtaatgaatttgggtttaagatggcaccaatgcttggtcgcggcaccttcgatagcctgattatgattccgaacgatttcgattcggttctcatggcttacaatgcaaccgcgaaagaggacctggtaaaagcgaacaactgcgtctttgatgccaatgtgatcggtgataacactgctgaaggctatgttcttaaaccgtgtgaacccaaatggttaccgaatgggacgcgtgtggcgatcaaatgcaagaactccaaattcagcgagaagaagaaaagtgacaaaccgatcaagacacaagtcccactgacggaaattgataagaatctgctggacgtattggcctgttatattactttaaaccgcgtgaacaacgtgatctctaagattggaacagtgacgccgcatgattttgagaaagtaatgtggctgactgttcaggatattctggaagaaacgtcacgtgagggtattgttctgacgacatcggacaatcctgacctcgtcaagaaagaacttgtccgcatggtgcaggatgtgttaaaatcggcatggcgcgaactggtgtcg

SEQ ID NO: 622 - protein, 343 aa, synthetic construct
  REGION 1..343: note = variant of RNA ligase 2 from Escherichia phage RB69 (Bacteriophage RB69)
MHHHHHHGGSGMFKKYSSLENHYNSKFIEKLYANGLTDGVWVAREKIHGTNFSLIIERDNVTCAKRTGPIKPTETFYGYEIVLKKYDKAIKTVQVSMYTAGAVSYQVFGEFAGNGIWKGVDYGEKDFYVFDILINAESGDNTYLTDYEMQDFCNEFGFKMAPMLGRGTFDSLIMIPNDFDSVLMAYNATAKEDLVKANNCVFDANVIGDNTAEGYVLKPCEPKWLPNGTRVAIKCKNSKFSEKKKSDKPIKTQVPLTEIDKNLLDVLACYITLNRVNNVISKIGTVTPHDFEKVMWLTVQDILEETSREGIVLTTSDNPDLVKKELVRMVQDVLKSAWRELVS

SEQ ID NO: 623 - DNA, 1029 bp, synthetic construct
  misc_feature 1..1029: note = variant of RNA ligase 2 from Escherichia phage RB69 (Bacteriophage RB69)
  source 1..1029: mol_type = other DNA
atgcatcaccatcaccatcacggtggcagcggtatgtttaagaaatattctagtctggaaaaccattacaatagcaaattcattgagaaactctatgctaacggcttaactgatggtgtatgggttgcgcgcgaaaagatccacgggacgaacttttcgctgattatcgagcgtgataatgtaacatgcgccaaacgtacaggcccgattaagcctaccgaaaccttctacggttatgaaatcgtcctgaagaaatacgataaagcgattaagacggtgcaggtgtctatgtataccgccggcgccgtttcctaccaagtgttcggagaatttgctggcaacggtatctggaaaggggtcgattatggcgagaaagacttctatgtgtttgatattctgatcaatgcggaatcaggagacaacacgtacctgactgattatgaaatgcaggacttctgtaatgaatgtgggtttaagatggcaccaatgcttggtcgcggcaccttcgatagcctgattatgattccgaacgatttcgattcggttctcatggcttacaatgcagtggcgaaagaggacctggtaaaagcgaacaactgcgtctttgatgccaatgtgatcggtgataacactgctgaaggctatgttcttaaaccgtgtgaacccaaatggttaccgaatgggacgcgtgtggcgatcaaatgcaagaactccaaattcagcgagaagaagaaaagtgacaaaccgatcaagacacaagtcccactgacggaaattgataagaatctgctggacgtattggcctgttatgtcactttaaaccgcgtgaacaacgtgatctctaagattggaacagtgacgccgaaagattttgagaaagtaatgtggctgactgttcaggatattctggaagaaacgtcacgtgagggtattgttctgacgacatcggacaatcctgacctcgtcaagaaagaacttgtccgcatggtgcaggatgtgttaaaatcggcatggcgcgaactggtgtcg

SEQ ID NO: 624 - protein, 343 aa, synthetic construct
  REGION 1..343: note = variant of RNA ligase 2 from Escherichia phage RB69 (Bacteriophage RB69)
MHHHHHHGGSGMFKKYSSLENHYNSKFIEKLYANGLTDGVWVAREKIHGTNFSLIIERDNVTCAKRTGPIKPTETFYGYEIVLKKYDKAIKTVQVSMYTAGAVSYQVFGEFAGNGIWKGVDYGEKDFYVFDILINAESGDNTYLTDYEMQDFCNECGFKMAPMLGRGTFDSLIMIPNDFDSVLMAYNAVAKEDLVKANNCVFDANVIGDNTAEGYVLKPCEPKWLPNGTRVAIKCKNSKFSEKKKSDKPIKTQVPLTEIDKNLLDVLACYVTLNRVNNVISKIGTVTPKDFEKVMWLTVQDILEETSREGIVLTTSDNPDLVKKELVRMVQDVLKSAWRELVS

SEQ ID NO: 625 - DNA, 1029 bp, synthetic construct
  misc_feature 1..1029: note = variant of RNA ligase 2 from Escherichia phage RB69 (Bacteriophage RB69)
  source 1..1029: mol_type = other DNA
atgcatcaccatcaccatcacggtggcagcggtatgtttaagaaatattctagtctggaaaaccattacaatagcaaattcattgagaaactctatgctaacggcttaactgatggtgtatgggttgcgcgcgaaaagatccacgggacgaacttttcgctgattatcgagcgtgataatgtaacatgcgccaaacgtacaggcccgattaagcctaccgaaaccttctacggttatgaaatcgtcctgaagaaatacgataaagcgattaagacggtgcaggtgtctatgtataccgccggcgccgtttcctaccaagtgttcggagaatttgctggcaacggtatctggaaaggggtcgattatggcgagaaagacttctatgtgtttgatattctgatcaatgcggaatcaggagacaacacgtacctgactgattatgaaatgcaggacttctgtaatgaatatgggtttaagatggcaccaatgcttggtcgcggcgccttcgatagcctgattatgattccgaacgatttcgattcggttctcatggcttacaatgcagtggcgaaagaggacctggtaaaagcgaacaactgcgtctttgatgccaatgtgatcggtgataacactgctgaaggctatgttcttaaaccgtgtgaacccaaatggttaccgaatgggacgcgtgtggcgatcaaatgcaagaactccaaattcagcgagaagaagaaaagtgacaaaccgatcaagacacaagtcccactgacggaaattgataagaatctgctggacgtattggcctgttatattactttaaaccgcgtgaacaacgtgatctctaagattggaacagtgacgccgaccgattttgagaaagtaatgtggctgactgttgaagatattctggaagaaacgtcacgtgagggtattgttctgacgacatcggacaatcctgacctcgtcaagaaagaacttgtccgcatggtgcaggatgtgttaaaatcggcctggcgcgaactggtgtcg

SEQ ID NO: 626 - protein, 343 aa, synthetic construct
  REGION 1..343: note = variant of RNA ligase 2 from Escherichia phage RB69 (Bacteriophage RB69)
MHHHHHHGGSGMFKKYSSLENHYNSKFIEKLYANGLTDGVWVAREKIHGTNFSLIIERDNVTCAKRTGPIKPTETFYGYEIVLKKYDKAIKTVQVSMYTAGAVSYQVFGEFAGNGIWKGVDYGEKDFYVFDILINAESGDNTYLTDYEMQDFCNEYGFKMAPMLGRGAFDSLIMIPNDFDSVLMAYNAVAKEDLVKANNCVFDANVIGDNTAEGYVLKPCEPKWLPNGTRVAIKCKNSKFSEKKKSDKPIKTQVPLTEIDKNLLDVLACYITLNRVNNVISKIGTVTPTDFEKVMWLTVEDILEETSREGIVLTTSDNPDLVKKELVRMVQDVLKSAWRELVS

SEQ ID NO: 627 - DNA, 1029 bp, synthetic construct
  misc_feature 1..1029: note = variant of RNA ligase 2 from Escherichia phage RB69 (Bacteriophage RB69)
  source 1..1029: mol_type = other DNA
atgcatcaccatcaccatcacggtggcagcggtatgtttaagaaatattctagtctggaaaaccattacaatagcaaattcattgagaaactctatgctaacggcttaactgatggtgtatgggttgcgcgcgaaaagatccacgggacgaacttttcgctgattatcgagcgtgataatgtaacatgcgccaaacgtacaggcccgattaagcctaccgaaaccttctacggttatgaaatcgtcctgaagaaatacgataaagcgattaagacggtgcagaaatctatgtataccgccggcgccgtttcctaccaagtgttcggagaatttgctggcaacggtatctggaaaggggtcgattatggcgagaaagacttctatgtgtttgatattctgatcaatgcggaatcaggagacaacacgtacctgactgattatgaaatgcaggacttctgtaatgaatgtgggtttaagatggcaccaatgcttggtcgcggcaccttcgatagcctgattatgattccgaacgatttcgattcggttctcatggcttacaatgcagtggcgaaagaggacctggtaaaagcgaacaactgcgtctttgatgccaatgtgatcggtgataacactgctgaaggctatgttcttaaaccgtgtgaacccaaatggttaccgaatgggacgcgtgtggcgatcaaatgcaagaactccaaattcagcgagaagaagaaaagtgacaaaccgatcaagacacaagtcccactgacggaaattgataagaatctgctggacgtattggcctgttatattactttaaaccgcgtgaacaacgtgatctctaagattggaacagtgacgccggccgattttgagaaagtaatgtggctgactgttcaggatattctggaagaaacgtcacgtgagggtattgttctgacgacatcggacaatcctgacctcgtcaagaaagaacttgtccgcatggtgcaggatgtgttaaaatcggcctggcgcgaactggtgtcg

SEQ ID NO: 628 - protein, 343 aa, synthetic construct
  REGION 1..343: note = variant of RNA ligase 2 from Escherichia phage RB69 (Bacteriophage RB69)
MHHHHHHGGSGMFKKYSSLENHYNSKFIEKLYANGLTDGVWVAREKIHGTNFSLIIERDNVTCAKRTGPIKPTETFYGYEIVLKKYDKAIKTVQKSMYTAGAVSYQVFGEFAGNGIWKGVDYGEKDFYVFDILINAESGDNTYLTDYEMQDFCNECGFKMAPMLGRGTFDSLIMIPNDFDSVLMAYNAVAKEDLVKANNCVFDANVIGDNTAEGYVLKPCEPKWLPNGTRVAIKCKNSKFSEKKKSDKPIKTQVPLTEIDKNLLDVLACYITLNRVNNVISKIGTVTPADFEKVMWLTVQDILEETSREGIVLTTSDNPDLVKKELVRMVQDVLKSAWRELVS

SEQ ID NO: 629 - DNA, 1029 bp, synthetic construct
  misc_feature 1..1029: note = variant of RNA ligase 2 from Escherichia phage RB69 (Bacteriophage RB69)
  source 1..1029: mol_type = other DNA
atgcatcaccatcaccatcacggtggcagcggtatgtttaagaaatattctagtctggaaaaccattacaatagcaaattcattgagaaactctatgctaacggcttaactgatggtgtatgggttgcgcgcgaaaagatccacgggacgaacttttcgctgattatcgagcgtgataatgtaacatgcgccaaacgtacaggcccgattaagcctaccgaaaccttctacggttatgaaatcgtcctgaagaaatacgataaagcgattaagacggtgcaggtgtctatgtataccgccggcgccgtttcctaccaagtgttcggagaatttgctggcaacggtatctggaaaggggtcgattatggcgagaaagacttctatgtgtttgatattctgatcaatgcggaatcaggagacaacacgtacctgactgattatgaaatgcaggacttctgtaatgaatgtgggtttaagatggcaccaatgcttggtcgcggcgccttcgatagcctgattatgattccgaacgatttcgattcggttctcatggcttacaatgcaaccgcgaaagaggacctggtaaaagcgaacaactgcgtctttgatgccaatgtgatcggtgataacactgctgaaggctatgttcttaaaccgtgtgaacccaaatggttaccgaatgggacgcgtgtggcgatcaaatgcaagaactccaaattcagcgagaagaagaaaagtgacaaaccgatcaagacacaagtcccactgacggaaattgataagaatctgctggacgtattggcctgttatattactttaaaccgcgtgaacaacgtgatctctaagattggaacagtgacgccgcatgattttgagaaagtaatgtggctgactgttgaagatattctggaagaaacgtcacgtgagggtattgttctgacgacatcggacaatcctgacctcgtcaagaaagaacttgtccgcatggtgcaggatgtgttaaaatcggcatggcgcgaactggtgtcg

SEQ ID NO: 630 - protein, 343 aa, synthetic construct
  REGION 1..343: note = variant of RNA ligase 2 from Escherichia phage RB69 (Bacteriophage RB69)
MHHHHHHGGSGMFKKYSSLENHYNSKFIEKLYANGLTDGVWVAREKIHGTNFSLIIERDNVTCAKRTGPIKPTETFYGYEIVLKKYDKAIKTVQVSMYTAGAVSYQVFGEFAGNGIWKGVDYGEKDFYVFDILINAESGDNTYLTDYEMQDFCNECGFKMAPMLGRGAFDSLIMIPNDFDSVLMAYNATAKEDLVKANNCVFDANVIGDNTAEGYVLKPCEPKWLPNGTRVAIKCKNSKFSEKKKSDKPIKTQVPLTEIDKNLLDVLACYITLNRVNNVISKIGTVTPHDFEKVMWLTVEDILEETSREGIVLTTSDNPDLVKKELVRMVQDVLKSAWRELVS

SEQ ID NO: 631 - DNA, 1029 bp, synthetic construct
  misc_feature 1..1029: note = variant of RNA ligase 2 from Escherichia phage RB69 (Bacteriophage RB69)
  source 1..1029: mol_type = other DNA
atgcatcaccatcaccatcacggtggcagcggtatgtttaagaaatattctagtctggaaaaccattacaatagcaaattcattgagaaactctatgctaacggcttaactgatggtgtatgggttgcgcgcgaaaagatccacgggacgaacttttcgctgattatcgagcgtgataatgtaacatgcgccaaacgtacaggcccgattaagcctaccgaaaccttctacggttatgaaatcgtcctgaagaaatacgataaagcgattaagacggtgcagaaatctatgtataccgccggcgccgtttcctaccaagtgttcggagaatttgctggcaacggtatctggaaaggggtcgattatggcgagaaagacttctatgtgtttgatattctgatcaatgcggaatcaggagacaacacgtacctgactgattatgaaatgcaggacttctgtaatgaatatgggtttaagatggcaccaatgcttggtcgcggcacattcgatagcctgattatgattccgaacgatttcgattcggttctcatggcttacaatgcagtggcgaaagaggacctggtaaaagcgaacaactgcgtctttgatgccaatgtgatcggtgataacactgctgaaggctatgttcttaaaccgtgtgaacccaaatggttaccgaatgggacgcgtgtggcgatcaaatgcaagaactccaaattcagcgagaagaagaaaagtgacaaaccgatcaagacacaagtcccactgacggaaattgataagaatctgctggacgtattggcctgttatgtcactttaaaccgcgtgaacaacgtgatctctaagattggaacagtgacgccggccgattttgagaaagtaatgtggctgactgttcaggatattctggaagaaacgtcacgtgagggtattgttctgacgacatcggacaatcctgacctcgtcaagaaagaacttgtccgcatggtgcaggatgtgttaaaatcgggctggcgcgaactggtgtcg

SEQ ID NO: 632 - protein, 343 aa, synthetic construct
  REGION 1..343: note = variant of RNA ligase 2 from Escherichia phage RB69 (Bacteriophage RB69)
MHHHHHHGGSGMFKKYSSLENHYNSKFIEKLYANGLTDGVWVAREKIHGTNFSLIIERDNVTCAKRTGPIKPTETFYGYEIVLKKYDKAIKTVQKSMYTAGAVSYQVFGEFAGNGIWKGVDYGEKDFYVFDILINAESGDNTYLTDYEMQDFCNEYGFKMAPMLGRGTFDSLIMIPNDFDSVLMAYNAVAKEDLVKANNCVFDANVIGDNTAEGYVLKPCEPKWLPNGTRVAIKCKNSKFSEKKKSDKPIKTQVPLTEIDKNLLDVLACYVTLNRVNNVISKIGTVTPADFEKVMWLTVQDILEETSREGIVLTTSDNPDLVKKELVRMVQDVLKSGWRELVS

SEQ ID NO: 633 - DNA, 1029 bp, synthetic construct
  misc_feature 1..1029: note = variant of RNA ligase 2 from Escherichia phage RB69 (Bacteriophage RB69)
  source 1..1029: mol_type = other DNA
atgcatcaccatcaccatcacggtggcagcggtatgtttaagaaatattctagtctggaaaaccattacaatagcaaattcattgagaaactctatgctaacggcttaactgatggtgtatgggttgcgcgcgaaaagatccacgggacgaacttttcgctgattatcgagcgtgataatgtaacatgcgccaaacgtacaggcccgattaagcctaccgaaaccttctacggttatgaaatcgtcctgaagaaatacgataaagcgattaagacggtgcagaaatctatgtataccgccggcgccgtttcctaccaagtgttcggagaatttgctggcaacggtatctggaaaggggtcgattatggcgagaaagacttctatgtgtttgatattctgatcaatgcggaatcaggagacaacacgtacctgactgattatgaaatgcaggacttctgtaatgaatgtgggtttaagatggcaccaatgcttggtcgcggcaccttcgatagcctgattatgattccgaacgatttcgattcggttctcatggcttacaatgcaaccgcgaaagaggacctggtaaaagcgaacaacagcgtctttgatgccaatgtgatcggtgataacactgctgaaggctatgttcttaaaccgtgtgaacccaaatggttaccgaatgggacgcgtgtggcgatcaaatgcaagaactccaaattcagcgagaagaagaaaagtgacaaaccgatcaagacacaagtcccactgacggaaattgataagaatctgctggacgtattggcctgttatattactttaaaccgcgtgaacaacgtgatctctaagattggaacagtgacgccgcatgattttgagaaagtaatgtggctgactgttcaggatattctggaagaaacgtcacgtgagggtattgttctgacgacatcggacaatcctgacctcgtcaagaaagaacttgtccgcatggtgcaggatgtgttaaaatcggcatggcgcgaactggtgtcg

SEQ ID NO: 634 - protein, 343 aa, synthetic construct
  REGION 1..343: note = variant of RNA ligase 2 from Escherichia phage RB69 (Bacteriophage RB69)
MHHHHHHGGSGMFKKYSSLENHYNSKFIEKLYANGLTDGVWVAREKIHGTNFSLIIERDNVTCAKRTGPIKPTETFYGYEIVLKKYDKAIKTVQKSMYTAGAVSYQVFGEFAGNGIWKGVDYGEKDFYVFDILINAESGDNTYLTDYEMQDFCNECGFKMAPMLGRGTFDSLIMIPNDFDSVLMAYNATAKEDLVKANNSVFDANVIGDNTAEGYVLKPCEPKWLPNGTRVAIKCKNSKFSEKKKSDKPIKTQVPLTEIDKNLLDVLACYITLNRVNNVISKIGTVTPHDFEKVMWLTVQDILEETSREGIVLTTSDNPDLVKKELVRMVQDVLKSAWRELVS

SEQ ID NO: 635 - DNA, 1029 bp, synthetic construct
  misc_feature 1..1029: note = variant of RNA ligase 2 from Escherichia phage RB69 (Bacteriophage RB69)
  source 1..1029: mol_type = other DNA
atgcatcaccatcaccatcacggtggcagcggtatgtttaagaaatattctagtctggaaaaccattacaatagcaaattcattgagaaactctatgctaacggcttaactgatggtgtatgggttgcgcgcgaaaagatccacgggacgaacttttcgctgattatcgagcgtgataatgtaacatgcgccaaacgtacaggcccgattaagcctaccgaaaccttctacggttatgaaatcgtcctgaagaaatacgataaagcgattaagacggtgcagaaatctatgtataccgccggcgccgtttcctaccaagtgttcggagaatttgctggcaacggtatctggaaaggggtcgattatggcgagaaagacttctatgtgtttgatattctgatcaatgcggaatcaggagacaacacgtacctgactgattatgaaatgcaggacttctgtaatgaatttgggtttaagatggcaccaatgcttggtcgcggcacattcgatagcctgattatgattccgaacgatttcgattcggttctcatggcttacaatgcagtggcgaaagaggacctggtaaaagcgaacaactgcgtctttgatgccaatgtgatcggtgataacactgctgaaggctatgttcttaaaccgtgtgaacccaaatggttaccgaatgggacgcgtgtggcgatcaaatgcaagaactccaaattcagcgagaagaagaaaagtgacaaaccgatcaagacacaagtcccactgacggaaattgataagaatctgctggacgtattggcctgttatgtcactttaaaccgcgtgaacaacgtgatctctaagattggaacagtgacgccgcatgattttgagaaagtaatgtggctgactgttcaggatattctggaagaaacgtcacgtgagggtattgttctgacgacatcggacaatcctgacctcgtcaagaaagaacttgtccgcatggtgcaggatgagttaaaatcggcctggcgcgaactggtgtcg

SEQ ID NO: 636 - protein, 343 aa, synthetic construct
  REGION 1..343: note = variant of RNA ligase 2 from Escherichia phage RB69 (Bacteriophage RB69)
MHHHHHHGGSGMFKKYSSLENHYNSKFIEKLYANGLTDGVWVAREKIHGTNFSLIIERDNVTCAKRTGPIKPTETFYGYEIVLKKYDKAIKTVQKSMYTAGAVSYQVFGEFAGNGIWKGVDYGEKDFYVFDILINAESGDNTYLTDYEMQDFCNEFGFKMAPMLGRGTFDSLIMIPNDFDSVLMAYNAVAKEDLVKANNCVFDANVIGDNTAEGYVLKPCEPKWLPNGTRVAIKCKNSKFSEKKKSDKPIKTQVPLTEIDKNLLDVLACYVTLNRVNNVISKIGTVTPHDFEKVMWLTVQDILEETSREGIVLTTSDNPDLVKKELVRMVQDELKSAWRELVS

SEQ ID NO: 637 - DNA, 1029 bp, synthetic construct
  misc_feature 1..1029: note = variant of RNA ligase 2 from Escherichia phage RB69 (Bacteriophage RB69)
  source 1..1029: mol_type = other DNA
atgcatcaccatcaccatcacggtggcagcggtatgtttaagaaatattctagtctggaaaaccattacaatagcaaattcattgagaaactctatgctaacggcttaactgatggtgtatgggttgcgcgcgaaaagatccacgggacgaacttttcgctgattatcgagcgtgataatgtaacatgcgccaaacgtacaggcccgattaagcctaccgaaaccttctacggttatgaaatcgtcctgaagaaatacgataaagcgattaagacggtgcagaaatctatgtataccgccggcgccgtttcctaccaagtgttcggagaatttgctggcaacggtatctggaaaggggtcgattatggcgagaaagacttctatgtgtttgatattctgatcaatgcggaatcaggagacaacacgtacctgactgattatgaaatgcaggacttctgtaatgaatgtgggtttaagatggcaccaatgcttggtcgcggcacattcgatagcctgattatgattccgaacgatttcgattcggttctcatggcttacaatgcagtggcgaaagaggacctggtaaaagcgaacaactgcgtctttgatgccaatgtgatcggtgataacactgctgaaggctatgttcttaaaccgtgtgaacccaaatggttaccgaatgggacgcgtgtggcgatcaaatgcaagaactccaaattcagcgagaagaagaaaagtgacaaaccgatcaagacacaagtcccactgacggaaattgataagaatctgctggacgtattggcctgttatgttactttaaaccgcgtgaacaacgtgatctctaagattggaacagtgacgccgaccgattttgagaaagtaatgtggctgactgttcaggatattctggaagaaacgtcacgtgagggtattgttctgacgacatcggacaatcctgacctcgtcaagaaagaacttgtccgcatggtgcaggatgtgttaaaatcggcatggcgcgaactggtgtcg

SEQ ID NO: 638 - protein, 343 aa, synthetic construct
  REGION 1..343: note = variant of RNA ligase 2 from Escherichia phage RB69 (Bacteriophage RB69)
MHHHHHHGGSGMFKKYSSLENHYNSKFIEKLYANGLTDGVWVAREKIHGTNFSLIIERDNVTCAKRTGPIKPTETFYGYEIVLKKYDKAIKTVQKSMYTAGAVSYQVFGEFAGNGIWKGVDYGEKDFYVFDILINAESGDNTYLTDYEMQDFCNECGFKMAPMLGRGTFDSLIMIPNDFDSVLMAYNAVAKEDLVKANNCVFDANVIGDNTAEGYVLKPCEPKWLPNGTRVAIKCKNSKFSEKKKSDKPIKTQVPLTEIDKNLLDVLACYVTLNRVNNVISKIGTVTPTDFEKVMWLTVQDILEETSREGIVLTTSDNPDLVKKELVRMVQDVLKSAWRELVS

SEQ ID NO: 639 - DNA, 1029 bp, synthetic construct
  misc_feature 1..1029: note = variant of RNA ligase 2 from Escherichia phage RB69 (Bacteriophage RB69)
  source 1..1029: mol_type = other DNA
atgcatcaccatcaccatcacggtggcagcggtatgtttaagaaatattctagtctggaaaaccattacaatagcaaattcattgagaaactctatgctaacggcttaactgatggtgtatgggttgcgcgcgaaaagatccacgggacgaacttttcgctgattatcgagcgtgataatgtaacatgcgccaaacgtacaggcccgattaagcctaccgaaaccttctacggttatgaaatcgtcctgaagaaatacgataaagcgattaagacggtgcagaaatctatgtataccgccggcgccgtttcctaccaagtgttcggagaatttgctggcaacggtatctggaaaggggtcgattatggcgagaaagacttctatgtgtttgatattctgatcaatgcggaatcaggagacaacacgtacctgactgattatgaaatgcaggacttctgtaatgaatatgggtttaagatggcaccaatgcttggtcgcggcacattcgatagcctgattatgattccgaacgatttcgattcggttctcatggcttacaatgcagtggcgaaagaggacctggtaaaagcgaacaacaccgtctttgatgccaatgtgatcggtgataacactgctgaaggctatgttcttaaaccgtgtgaacccaaatggttaccgaatgggacgcgtgtggcgatcaaatgcaagaactccaaattcagcgagaagaagaaaagtgacaaaccgatcaagacacaagtcccactgacggaaattgataagaatctgctggacgtattggcctgttatgtcactttaaaccgcgtgaacaacgtgatctctaagattggaacagtgacgccgcatgattttgagaaagtaatgtggctgactgttgaagatattctggaagaaacgtcacgtgagggtattgttctgacgacatcggacaatcctgacctcgtcaagaaagaacttgtccgcatggtgcaggatgagttaaaatcgggctggcgcgaactggtgtcg

SEQ ID NO: 640 - protein, 343 aa, synthetic construct
  REGION 1..343: note = variant of RNA ligase 2 from Escherichia phage RB69 (Bacteriophage RB69)
MHHHHHHGGSGMFKKYSSLENHYNSKFIEKLYANGLTDGVWVAREKIHGTNFSLIIERDNVTCAKRTGPIKPTETFYGYEIVLKKYDKAIKTVQKSMYTAGAVSYQVFGEFAGNGIWKGVDYGEKDFYVFDILINAESGDNTYLTDYEMQDFCNEYGFKMAPMLGRGTFDSLIMIPNDFDSVLMAYNAVAKEDLVKANNTVFDANVIGDNTAEGYVLKPCEPKWLPNGTRVAIKCKNSKFSEKKKSDKPIKTQVPLTEIDKNLLDVLACYVTLNRVNNVISKIGTVTPHDFEKVMWLTVEDILEETSREGIVLTTSDNPDLVKKELVRMVQDELKSGWRELVS

SEQ ID NO: 641 - DNA, 1029 bp, synthetic construct
  misc_feature 1..1029: note = variant of RNA ligase 2 from Escherichia phage RB69 (Bacteriophage RB69)
  source 1..1029: mol_type = other DNA
atgcatcaccatcaccatcacggtggcagcggtatgtttaagaaatattctagtctggaaaaccattacaatagcaaattcattgagaaactctatgctaacggcttaactgatggtgtatgggttgcgcgcgaaaagatccacgggacgaacttttcgctgattatcgagcgtgataatgtaacatgcgccaaacgtacaggcccgattaagcctaccgaaaccttctacggttatgaaatcgtcctgaagaaatacgataaagcgattaagacggtgcagaaatctatgtataccgccggcgccgtttcctaccaagtgttcggagaatttgctggcaacggtatctggaaaggggtcgattatggcgagaaagacttctatgtgtttgatattctgatcaatgcggaatcaggagacaacacgtacctgactgattatgaaatgcaggacttctgtaatgaatatgggtttaagatggcaccaatgcttggtcgcggcacattcgatagcctgattatgattccgaacgatttcgattcggttctcatggcttacaatgcaacggcgaaagaggacctggtaaaagcgaacaacaccgtctttgatgccaatgtgatcggtgataacactgctgaaggctatgttcttaaaccgtgtgaacccaaatggttaccgaatgggacgcgtgtggcgatcaaatgcaagaactccaaattcagcgagaagaagaaaagtgacaaaccgatcaagacacaagtcccactgacggaaattgataagaatctgctggacgtattggcctgttatgtcactttaaaccgcgtgaacaacgtgatctctaagattggaacagtgacgccggccgattttgagaaagtaatgtggctgactgttcaggatattctggaagaaacgtcacgtgagggtattgttctgacgacatcggacaatcctgacctcgtcaagaaagaacttgtccgcatggtgcaggatgtgttaaaatcggcatggcgcgaactggtgtcg

SEQ ID NO: 642 - protein, 343 aa, synthetic construct
  REGION 1..343: note = variant of RNA ligase 2 from Escherichia phage RB69 (Bacteriophage RB69)
MHHHHHHGGSGMFKKYSSLENHYNSKFIEKLYANGLTDGVWVAREKIHGTNFSLIIERDNVTCAKRTGPIKPTETFYGYEIVLKKYDKAIKTVQKSMYTAGAVSYQVFGEFAGNGIWKGVDYGEKDFYVFDILINAESGDNTYLTDYEMQDFCNEYGFKMAPMLGRGTFDSLIMIPNDFDSVLMAYNATAKEDLVKANNTVFDANVIGDNTAEGYVLKPCEPKWLPNGTRVAIKCKNSKFSEKKKSDKPIKTQVPLTEIDKNLLDVLACYVTLNRVNNVISKIGTVTPADFEKVMWLTVQDILEETSREGIVLTTSDNPDLVKKELVRMVQDVLKSAWRELVS

SEQ ID NO: 643 - DNA, 1029 bp, synthetic construct
  misc_feature 1..1029: note = variant of RNA ligase 2 from Escherichia phage RB69 (Bacteriophage RB69)
  source 1..1029: mol_type = other DNA
atgcatcaccatcaccatcacggtggcagcggtatgtttaagaaatattctagtctggaaaaccattacaatagcaaattcattgagaaactctatgctaacggcttaactgatggtgtatgggttgcgcgcgaaaagatccacgggacgaacttttcgctgattatcgagcgtgataatgtaacatgcgccaaacgtacaggcccgattaagcctaccgaaaccttctacggttatgaaatcgtcctgaagaaatacgataaagcgattaagacggtgcagaaatctatgtataccgccggcgccgtttcctaccaagtgttcggagaatttgctggcaacggtatctggaaaggggtcgattatggcgagaaagacttctatgtgtttgatattctgatcaatgcggaatcaggagacaacacgtacctgactgattatgaaatgcaggacttctgtaatgaatttgggtttaagatggcaccaatgcttggtcgcggcaccttcgatagcctgattatgattccgaacgatttcgattcggttctcatggcttacaatgcagtggcgaaagaggacctggtaaaagcgaacaacagcgtctttgatgccaatgtgatcggtgataacactgctgaaggctatgttcttaaaccgtgtgaacccaaatggttaccgaatgggacgcgtgtggcgatcaaatgcaagaactccaaattcagcgagaagaagaaaagtgacaaaccgatcaagacacaagtcccactgacggaaattgataagaatctgctggacgtattggcctgttatattactttaaaccgcgtgaacaacgtgatctctaagattggaacagtgacgccgaaagattttgagaaagtaatgtggctgactgttcaggatattctggaagaaacgtcacgtgagggcattgttctgacgacatcggacaatcctgacctcgtcaagaaagaacttgtccgcatggtgcaggatgtgttaaaatcgggctggcgcgaactggtgtcg

SEQ ID NO: 644 - protein, 343 aa, synthetic construct
  REGION 1..343: note = variant of RNA ligase 2 from Escherichia phage RB69 (Bacteriophage RB69)
MHHHHHHGGSGMFKKYSSLENHYNSKFIEKLYANGLTDGVWVAREKIHGTNFSLIIERDNVTCAKRTGPIKPTETFYGYEIVLKKYDKAIKTVQKSMYTAGAVSYQVFGEFAGNGIWKGVDYGEKDFYVFDILINAESGDNTYLTDYEMQDFCNEFGFKMAPMLGRGTFDSLIMIPNDFDSVLMAYNAVAKEDLVKANNSVFDANVIGDNTAEGYVLKPCEPKWLPNGTRVAIKCKNSKFSEKKKSDKPIKTQVPLTEIDKNLLDVLACYITLNRVNNVISKIGTVTPKDFEKVMWLTVQDILEETSREGIVLTTSDNPDLVKKELVRMVQDVLKSGWRELVS

SEQ ID NO: 645 - DNA, 1029 bp, synthetic construct
  misc_feature 1..1029: note = variant of RNA ligase 2 from Escherichia phage RB69 (Bacteriophage RB69)
  source 1..1029: mol_type = other DNA
atgcatcaccatcaccatcacggtggcagcggtatgtttaagaaatattctagtctggaaaaccattacaatagcaaattcattgagaaactctatgctaacggcttaactgatggtgtatgggttgcgcgcgaaaagatccacgggacgaacttttcgctgattatcgagcgtgataatgtaacatgcgccaaacgtacaggcccgattaagcctaccgaaaccttctacggttatgaaatcgtcctgaagaaatacgataaagcgattaagacggtgcagaaatctatgtataccgccggcgccgtttcctaccaagtgttcggagaatttgctggcaacggtatctggaaaggggtcgattatggcgagaaagacttctatgtgtttgatattctgatcaatgcggaatcaggagacaacacgtacctgactgattatgaaatgcaggacttctgtaatgaatatgggtttaagatggcaccaatgcttggtcgcggcacattcgatagcctgattatgattccgaacgatttcgattcggttctcatggcttacaatgcaacggcgaaagaggacctggtaaaagcgaacaacagcgtctttgatgccaatgtgatcggtgataacactgctgaaggctatgttcttaaaccgtgtgaacccaaatggttaccgaatgggacgcgtgtggcgatcaaatgcaagaactccaaattcagcgagaagaagaaaagtgacaaaccgatcaagacacaagtcccactgacggaaattgataagaatctgctggacgtattggcctgttatattactttaaaccgcgtgaacaacgtgatctctaagattggaacagtgacgccggccgattttgagaaagtaatgtggctgactgttcaggatattctggaagaaacgtcacgtgagggtattgttctgacgacatcggacaatcctgacctcgtcaagaaagaacttgtccgcatggtgcaggatgagttaaaatcgggctggcgcgaactggtgtcg

SEQ ID NO: 646 - protein, 343 aa, synthetic construct
  REGION 1..343: note = variant of RNA ligase 2 from Escherichia phage RB69 (Bacteriophage RB69)
MHHHHHHGGSGMFKKYSSLENHYNSKFIEKLYANGLTDGVWVAREKIHGTNFSLIIERDNVTCAKRTGPIKPTETFYGYEIVLKKYDKAIKTVQKSMYTAGAVSYQVFGEFAGNGIWKGVDYGEKDFYVFDILINAESGDNTYLTDYEMQDFCNEYGFKMAPMLGRGTFDSLIMIPNDFDSVLMAYNATAKEDLVKANNSVFDANVIGDNTAEGYVLKPCEPKWLPNGTRVAIKCKNSKFSEKKKSDKPIKTQVPLTEIDKNLLDVLACYITLNRVNNVISKIGTVTPADFEKVMWLTVQDILEETSREGIVLTTSDNPDLVKKELVRMVQDELKSGWRELVS

SEQ ID NO: 647 - DNA, 1029 bp, synthetic construct
  misc_feature 1..1029: note = variant of RNA ligase 2 from Escherichia phage RB69 (Bacteriophage RB69)
  source 1..1029: mol_type = other DNA
atgcatcaccatcaccatcacggtggcagcggtatgtttaagaaatattctagtctggaaaaccattacaatagcaaattcattgagaaactctatgctaacggcttaactgatggtgtatgggttgcgcgcgaaaagatccacgggacgaacttttcgctgattatcgagcgtgataatgtaacatgcgccaaacgtacaggcccgattaagcctaccgaaaccttctacggttatgaaatcgtcctgaagaaatacgataaagcgattaagacggtgcagaaatctatgtataccgccggcgccgtttcctaccaagtgttcggagaatttgctggcaacggtatctggaaaggggtcgattatggcgagaaagacttctatgtgtttgatattctgatcaatgcggaatcaggagacaacacgtacctgactgattatgaaatgcaggacttctgtaatgaatgtgggtttaagatggcaccaatgcttggtcgcggcgccttcgatagcctgattatgattccgaacgatttcgattcggttctcatggcttacaatgcaaccgcgaaagaggacctggtaaaagcgaacaactgcgtctttgatgccaatgtgatcggtgataacactgctgaaggctatgttcttaaaccgtgtgaacccaaatggttaccgaatgggacgcgtgtggcgatcaaatgcaagaactccaaattcagcgagaagaagaaaagtgacaaaccgatcaagacacaagtcccactgacggaaattgataagaatctgctggacgtattggcctgttatattactttaaaccgcgtgaacaacgtgatctctaagattggaacagtgacgccgcatgattttgagaaagtaatgtggctgactgttgaagatattctggaagaaacgtcacgtgagggtattgttctgacgacatcggacaatcctgacctcgtcaagaaagaacttgtccgcatggtgcaggatgtgttaaaatcggcatggcgcgaactggtgtcg

SEQ ID NO: 648 - protein, 343 aa, synthetic construct
  REGION 1..343: note = variant of RNA ligase 2 from Escherichia phage RB69 (Bacteriophage RB69)
MHHHHHHGGSGMFKKYSSLENHYNSKFIEKLYANGLTDGVWVAREKIHGTNFSLIIERDNVTCAKRTGPIKPTETFYGYEIVLKKYDKAIKTVQKSMYTAGAVSYQVFGEFAGNGIWKGVDYGEKDFYVFDILINAESGDNTYLTDYEMQDFCNECGFKMAPMLGRGAFDSLIMIPNDFDSVLMAYNATAKEDLVKANNCVFDANVIGDNTAEGYVLKPCEPKWLPNGTRVAIKCKNSKFSEKKKSDKPIKTQVPLTEIDKNLLDVLACYITLNRVNNVISKIGTVTPHDFEKVMWLTVEDILEETSREGIVLTTSDNPDLVKKELVRMVQDVLKSAWRELVS

SEQ ID NO: 649 - DNA, 1029 bp, synthetic construct
  misc_feature 1..1029: note = variant of RNA ligase 2 from Escherichia phage RB69 (Bacteriophage RB69)
  source 1..1029: mol_type = other DNA
atgcatcaccatcaccatcacggtggcagcggtatgtttaagaaatattctagtctggaaaaccattacaatagcaaattcattgagaaactctatgctaacggcttaactgatggtgtatgggttgcgcgcgaaaagatccacgggacgaacttttcgctgattatcgagcgtgataatgtaacatgcgccaaacgtacaggcccgattaagcctaccgaaaccttctacggttatgaaatcgtcctgaagaaatacgataaagcgattaagacggtgcagaaatctatgtataccgccggcgccgtttcctaccaagtgttcggagaatttgctggcaacggtatctggaaaggggtcgattatggcgagaaagacttctatgtgtttgatattctgatcaatgcggaatcaggagacaacacgtacctgactgattatgaaatgcaggacttctgtaatgaatgtgggtttaagatggcaccaatgcttggtcgcggcacattcgatagcctgattatgattccgaacgatttcgattcggttctcatggcttacaatgcaaccgcgaaagaggacctggtaaaagcgaacaactgcgtctttgatgccaatgtgatcggtgataacactgctgaaggctatgttcttaaaccgtgtgaacccaaatggttaccgaatgggacgcgtgtggcgatcaaatgcaagaactccaaattcagcgagaagaagaaaagtgacaaaccgatcaagacacaagtcccactgacggaaattgataagaatctgctggacgtattggcctgttatgttactttaaaccgcgtgaacaacgtgatctctaagattggaacagtgacgccgaccgattttgagaaagtaatgtggctgactgttcaggatattctggaagaaacgtcacgtgagggtattgttctgacgacatcggacaatcctgacctcgtcaagaaagaacttgtccgcatggtgcaggatgtgttaaaatcgggctggcgcgaactggtgtcg

SEQ ID NO: 650 - protein, 343 aa, synthetic construct
  REGION 1..343: note = variant of RNA ligase 2 from Escherichia phage RB69 (Bacteriophage RB69)
MHHHHHHGGSGMFKKYSSLENHYNSKFIEKLYANGLTDGVWVAREKIHGTNFSLIIERDNVTCAKRTGPIKPTETFYGYEIVLKKYDKAIKTVQKSMYTAGAVSYQVFGEFAGNGIWKGVDYGEKDFYVFDILINAESGDNTYLTDYEMQDFCNECGFKMAPMLGRGTFDSLIMIPNDFDSVLMAYNATAKEDLVKANNCVFDANVIGDNTAEGYVLKPCEPKWLPNGTRVAIKCKNSKFSEKKKSDKPIKTQVPLTEIDKNLLDVLACYVTLNRVNNVISKIGTVTPTDFEKVMWLTVQDILEETSREGIVLTTSDNPDLVKKELVRMVQDVLKSGWRELVS

SEQ ID NO: 651 - DNA, 1029 bp, synthetic construct
  misc_feature 1..1029: note = variant of RNA ligase 2 from Escherichia phage RB69 (Bacteriophage RB69)
  source 1..1029: mol_type = other DNA
atgcatcaccatcaccatcacggtggcagcggtatgtttaagaaatattctagtctggaaaaccattacaatagcaaattcattgagaaactctatgctaacggcttaactgatggtgtatgggttgcgcgcgaaaagatccacgggacgaacttttcgctgattatcgagcgtgataatgtaacatgcgccaaacgtacaggcccgattaagcctaccgaaaccttctacggttatgaaatcgtcctgaagaaatacgataaagcgattaagacggtgcagaaatctatgtataccgccggcgccgtttcctaccaagtgttcggagaatttgctggcaacggtatctggaaaggggtcgattatggcgagaaagacttctatgtgtttgatattctgatcaatgcggaatcaggagacaacacgtacctgactgattatgaaatgcaggacttctgtaatgaatatgggtttaagatggcaccaatgcttggtcgcggcgccttcgatagcctgattatgattccgaacgatttcgattcggttctcatggcttacaatgcaaccgcgaaagaggacctggtaaaagcgaacaactgcgtctttgatgccaatgtgatcggtgataacactgctgaaggctatgttcttaaaccgtgtgaacccaaatggttaccgaatgggacgcgtgtggcgatcaaatgcaagaactccaaattcagcgagaagaagaaaagtgacaaaccgatcaagacacaagtcccactgacggaaattgataagaatctgctggacgtattggcctgttatgttactttaaaccgcgtgaacaacgtgatctctaagattggaacagtgacgccgcatgattttgagaaagtaatgtggctgactgttcaggatattctggaagaaacgtcacgtgagggtattgttctgacgacatcggacaatcctgacctcgtcaagaaagaacttgtccgcatggtgcaggatgtgttaaaatcgggctggcgcgaactggtgtcg

SEQ ID NO: 652 - protein, 343 aa, synthetic construct
  REGION 1..343: note = variant of RNA ligase 2 from Escherichia phage RB69 (Bacteriophage RB69)
MHHHHHHGGSGMFKKYSSLENHYNSKFIEKLYANGLTDGVWVAREKIHGTNFSLIIERDNVTCAKRTGPIKPTETFYGYEIVLKKYDKAIKTVQKSMYTAGAVSYQVFGEFAGNGIWKGVDYGEKDFYVFDILINAESGDNTYLTDYEMQDFCNEYGFKMAPMLGRGAFDSLIMIPNDFDSVLMAYNATAKEDLVKANNCVFDANVIGDNTAEGYVLKPCEPKWLPNGTRVAIKCKNSKFSEKKKSDKPIKTQVPLTEIDKNLLDVLACYVTLNRVNNVISKIGTVTPHDFEKVMWLTVQDILEETSREGIVLTTSDNPDLVKKELVRMVQDVLKSGWRELVS

SEQ ID NO: 653 - DNA, 1029 bp, synthetic construct
  misc_feature 1..1029: note = variant of RNA ligase 2 from Escherichia phage RB69 (Bacteriophage RB69)
  source 1..1029: mol_type = other DNA
atgcatcaccatcaccatcacggtggcagcggtatgtttaagaaatattctagtctggaaaaccattacaatagcaaattcattgagaaactctatgctaacggcttaactgatggtgtatgggttgcgcgcgaaaagatccacgggacgaacttttcgctgattatcgagcgtgataatgtaacatgcgccaaacgtacaggcccgattaagcctaccgaaaccttctacggttatgaaatcgtcctgaagaaatacgataaagcgattaagacggtgcagaaatctatgtataccgccggcgccgtttcctaccaagtgttcggagaatttgctggcaacggtatctggaaaggggtcgattatggcgagaaagacttctatgtgtttgatattctgatcaatgcggaatcaggagacaacacgtacctgactgattatgaaatgcaggacttctgtaatgaatttgggtttaagatggcaccaatgcttggtcgcggcgccttcgatagcctgattatgattccgaacgatttcgattcggttctcatggcttacaatgcagtggcgaaagaggacctggtaaaagcgaacaactgcgtctttgatgccaatgtgatcggtgataacactgctgaaggctatgttcttaaaccgtgtgaacccaaatggttaccgaatgggacgcgtgtggcgatcaaatgcaagaactccaaattcagcgagaagaagaaaagtgacaaaccgatcaagacacaagtcccactgacggaaattgataagaatctgctggacgtattggcctgttatgtcactttaaaccgcgtgaacaacgtgatctctaagattggaacagtgacgccgaccgattttgagaaagtaatgtggctgactgttcaggatattctggaagaaacgtcacgtgagggtattgttctgacgacatcggacaatcctgacctcgtcaagaaagaacttgtccgcatggtgcaggatgtgttaaaatcggcctggcgcgaactggtgtcg

SEQ ID NO: 654 - protein, 343 aa, synthetic construct
  REGION 1..343: note = variant of RNA ligase 2 from Escherichia phage RB69 (Bacteriophage RB69)
MHHHHHHGGSGMFKKYSSLENHYNSKFIEKLYANGLTDGVWVAREKIHGTNFSLIIERDNVTCAKRTGPIKPTETFYGYEIVLKKYDKAIKTVQKSMYTAGAVSYQVFGEFAGNGIWKGVDYGEKDFYVFDILINAESGDNTYLTDYEMQDFCNEFGFKMAPMLGRGAFDSLIMIPNDFDSVLMAYNAVAKEDLVKANNCVFDANVIGDNTAEGYVLKPCEPKWLPNGTRVAIKCKNSKFSEKKKSDKPIKTQVPLTEIDKNLLDVLACYVTLNRVNNVISKIGTVTPTDFEKVMWLTVQDILEETSREGIVLTTSDNPDLVKKELVRMVQDVLKSAWRELVS

SEQ ID NO: 655 - DNA, 1029 bp, synthetic construct
  misc_feature 1..1029: note = variant of RNA ligase 2 from Escherichia phage RB69 (Bacteriophage RB69)
  source 1..1029: mol_type = other DNA
atgcatcaccatcaccatcacggtggcagcggtatgtttaagaaatattctagtctggaaaaccattacaatagcaaattcattgagaaactctatgctaacggcttaactgatggtgtatgggttgcgcgcgaaaagatccacgggacgaacttttcgctgattatcgagcgtgataatgtaacatgcgccaaacgtacaggcccgattaagcctaccgaaaccttctacggttatgaaatcgtcctgaagaaatacgataaagcgattaagacggtgcagaaatctatgtataccgccggcgccgtttcctaccaagtgttcggagaatttgctggcaacggtatctggaaaggggtcgattatggcgagaaagacttctatgtgtttgatattctgatcaatgcggaatcaggagacaacacgtacctgactgattatgaaatgcaggacttctgtaatgaatatgggtttaagatggcaccaatgcttggtcgcggcaccttcgatagcctgattatgattccgaacgatttcgattcggttctcatggcttacaatgcaaccgcgaaagaggacctggtaaaagcgaacaactgcgtctttgatgccaatgtgatcggtgataacactgctgaaggctatgttcttaaaccgtgtgaacccaaatggttaccgaatgggacgcgtgtggcgatcaaatgcaagaactccaaattcagcgagaagaagaaaagtgacaaaccgatcaagacacaagtcccactgacggaaattgataagaatctgctggacgtattggcctgttatattactttaaaccgcgtgaacaacgtgatctctaagattggaacagtgacgccgaccgattttgagaaagtaatgtggctgactgttcaagatattctggaagaaacgtcacgtgagggtattgttctgacgacatcggacaatcctgacctcgtcaagaaagaacttgtccgcatggtgcaggatgtgttaaaatcggcatggcgcgaactggtgtcg

SEQ ID NO: 656 - protein, 343 aa, synthetic construct
  REGION 1..343: note = variant of RNA ligase 2 from Escherichia phage RB69 (Bacteriophage RB69)
MHHHHHHGGSGMFKKYSSLENHYNSKFIEKLYANGLTDGVWVAREKIHGTNFSLIIERDNVTCAKRTGPIKPTETFYGYEIVLKKYDKAIKTVQKSMYTAGAVSYQVFGEFAGNGIWKGVDYGEKDFYVFDILINAESGDNTYLTDYEMQDFCNEYGFKMAPMLGRGTFDSLIMIPNDFDSVLMAYNATAKEDLVKANNCVFDANVIGDNTAEGYVLKPCEPKWLPNGTRVAIKCKNSKFSEKKKSDKPIKTQVPLTEIDKNLLDVLACYITLNRVNNVISKIGTVTPTDFEKVMWLTVQDILEETSREGIVLTTSDNPDLVKKELVRMVQDVLKSAWRELVS

SEQ ID NO: 657 - DNA, 1029 bp, synthetic construct
  misc_feature 1..1029: note = variant of RNA ligase 2 from Escherichia phage RB69 (Bacteriophage RB69)
  source 1..1029: mol_type = other DNA
atgcatcaccatcaccatcacggtggcagcggtatgtttaagaaatattctagtctggaaaaccattacaatagcaaattcattgagaaactctatgctaacggcttaactgatggtgtatgggttgcgcgcgaaaagatccacgggacgaacttttcgctgattatcgagcgtgataatgtaacatgcgccaaacgtacaggcccgattaagcctaccgaaaccttctacggttatgaaatcgtcctgaagaaatacgataaagcgattaagacggtgcagaaatctatgtataccgccggcgccgtttcctaccaagtgttcggagaatttgctggcaacggtatctggaaaggggtcgattatggcgagaaagacttctatgtgtttgatattctgatcaatgcggaatcaggagacaacacgtacctgactgattatgaaatgcaggacttctgtaatgaatgtgggtttaagatggcaccaatgcttggtcgcggcaccttcgatagcctgattatgattccgaacgatttcgattcggttctcatggcttacaatgcagtggcgaaagaggacctggtaaaagcgaacaactgcgtctttgatgccaatgtgatcggtgataacactgctgaaggctatgttcttaaaccgtgtgaacccaaatggttaccgaatgggacgcgtgtggcgatcaaatgcaagaactccaaattcagcgagaagaagaaaagtgacaaaccgatcaagacacaagtcccactgacggaaattgataagaatctgctggacgtattggcctgttatgttactttaaaccgcgtgaacaacgtgatctctaagattggaacagtgacgccgcatgattttgagaaagtaatgtggctgactgttgaagatattctggaagaaacgtcacgtgagggtattgttctgacgacatcggacaatcctgacctcgtcaagaaagaacttgtccgcatggtgcaggatgtgttaaaatcggcctggcgcgaactggtgtcg

SEQ ID NO: 658 - protein, 343 aa, synthetic construct
  REGION 1..343: note = variant of RNA ligase 2 from Escherichia phage RB69 (Bacteriophage RB69)
MHHHHHHGGSGMFKKYSSLENHYNSKFIEKLYANGLTDGVWVAREKIHGTNFSLIIERDNVTCAKRTGPIKPTETFYGYEIVLKKYDKAIKTVQKSMYTAGAVSYQVFGEFAGNGIWKGVDYGEKDFYVFDILINAESGDNTYLTDYEMQDFCNECGFKMAPMLGRGTFDSLIMIPNDFDSVLMAYNAVAKEDLVKANNCVFDANVIGDNTAEGYVLKPCEPKWLPNGTRVAIKCKNSKFSEKKKSDKPIKTQVPLTEIDKNLLDVLACYVTLNRVNNVISKIGTVTPHDFEKVMWLTVEDILEETSREGIVLTTSDNPDLVKKELVRMVQDVLKSAWRELVS

SEQ ID NO: 659 - DNA, 1029 bp, synthetic construct
  misc_feature 1..1029: note = variant of RNA ligase 2 from Escherichia phage RB69 (Bacteriophage RB69)
  source 1..1029: mol_type = other DNA
atgcatcaccatcaccatcacggtggcagcggtatgtttaagaaatattctagtctggaaaaccattacaatagcaaattcattgagaaactctatgctaacggcttaactgatggtgtatgggttgcgcgcgaaaagatccacgggacgaacttttcgctgattatcgagcgtgataatgtaacatgcgccaaacgtacaggcccgattaagcctaccgaaaccttctacggctatgaaatcgtcctgaagaaatacgataaagcgattaagacggtgcagaaatctatgtataccgccggcgccgtttcctaccaagtgttcggagaatttgctggcaacggtatctggaaaggggtcgattatggcgagaaagacttctatgtgtttgatattctgatcaatgcggaatcaggagacaacacgtacctgactgattatgaaatgcaggacttctgtaatgaatatgggtttaagatggcaccaatgcttggtcgcggcacattcgatagcctgattatgattccgaacgatttcgattcggttctcatggcttacaatgcaacggcgaaagaggacctggtaaaagcgaacaactgcgtctttgatgccaatgtgatcggtgataacactgctgaaggctatgttcttaaaccgtgtgaacccaaatggttaccgaatgggacgcgtgtggcgatcaaatgcaagaactccaaattcagcgagaagaagaaaagtgacaaaccgatcaagacacaagtcccactgacggaaattgataagaatctgctggacgtattggcctgttatgtcactttaaaccgcgtgaacaacgtgatctctaagattggaacagtgacgccgaccgattttgagaaagtaatgtggctgactgttgaagatattctggaagaaacgtcacgtgagggtattgttctgacgacatcggacaatcctgacctcgtcaagaaagaacttgtccgcatggtgcaggatgtgttaaaatcgggctggcgcgaactggtgtcg

SEQ ID NO: 660 - protein, 343 aa, synthetic construct
  REGION 1..343: note = variant of RNA ligase 2 from Escherichia phage RB69 (Bacteriophage RB69)
MHHHHHHGGSGMFKKYSSLENHYNSKFIEKLYANGLTDGVWVAREKIHGTNFSLIIERDNVTCAKRTGPIKPTETFYGYEIVLKKYDKAIKTVQKSMYTAGAVSYQVFGEFAGNGIWKGVDYGEKDFYVFDILINAESGDNTYLTDYEMQDFCNEYGFKMAPMLGRGTFDSLIMIPNDFDSVLMAYNATAKEDLVKANNCVFDANVIGDNTAEGYVLKPCEPKWLPNGTRVAIKCKNSKFSEKKKSDKPIKTQVPLTEIDKNLLDVLACYVTLNRVNNVISKIGTVTPTDFEKVMWLTVEDILEETSREGIVLTTSDNPDLVKKELVRMVQDVLKSGWRELVS

SEQ ID NO: 661 - DNA, 1029 bp, synthetic construct
  misc_feature 1..1029: note = variant of RNA ligase 2 from Escherichia phage RB69 (Bacteriophage RB69)
  source 1..1029: mol_type = other DNA
atgcatcaccatcaccatcacggtggcagcggtatgtttaagaaatattctagtctggaaaaccattacaatagcaaattcattgagaaactctatgctaacggcttaactgatggtgtatgggttgcgcgcgaaaagatccacgggacgaacttttcgctgattatcgagcgtgataatgtaacatgcgccaaacgtacaggcccgattaagcctaccgaaaccttctacggttatgaaatcgtcctgaagaaatacgataaagcgattaagacggtgcagaaatctatgtataccgccggcgccgtttcctaccaagtgttcggagaatttgctggcaacggtatctggaaaggggtcgattatggcgagaaagacttctatgtgtttgatattctgatcaatgcggaatcaggagacaacacgtacctgactgattatgaaatgcaggacttctgtaatgaatgtgggtttaagatggcaccaatgcttggtcgcggcgccttcgatagcctgattatgattccgaacgatttcgattcggttctcatggcttacaatgcagtggcgaaagaggacctggtaaaagcgaacaactgcgtctttgatgccaatgtgatcggtgataacactgctgaaggctatgttcttaaaccgtgtgaacccaaatggttaccgaatgggacgcgtgtggcgatcaaatgcaagaactccaaattcagcgagaagaagaaaagtgacaaaccgatcaagacacaagtcccactgacggaaattgataagaatctgctggacgtattggcctgttatgttactttaaaccgcgtgaacaacgtgatctctaagattggaacagtgacgccgaccgattttgagaaagtaatgtggctgactgttcaggatattctggaagaaacgtcacgtgagggtattgttctgacgacatcggacaatcctgacctcgtcaagaaagaacttgtccgcatggtgcaggatgtgttaaaatcggcctggcgcgaactggtgtcg

SEQ ID NO: 662 - protein, 343 aa, synthetic construct
  REGION 1..343: note = variant of RNA ligase 2 from Escherichia phage RB69 (Bacteriophage RB69)
MHHHHHHGGSGMFKKYSSLENHYNSKFIEKLYANGLTDGVWVAREKIHGTNFSLIIERDNVTCAKRTGPIKPTETFYGYEIVLKKYDKAIKTVQKSMYTAGAVSYQVFGEFAGNGIWKGVDYGEKDFYVFDILINAESGDNTYLTDYEMQDFCNECGFKMAPMLGRGAFDSLIMIPNDFDSVLMAYNAVAKEDLVKANNCVFDANVIGDNTAEGYVLKPCEPKWLPNGTRVAIKCKNSKFSEKKKSDKPIKTQVPLTEIDKNLLDVLACYVTLNRVNNVISKIGTVTPTDFEKVMWLTVQDILEETSREGIVLTTSDNPDLVKKELVRMVQDVLKSAWRELVS

SEQ ID NO: 663 - DNA, 1029 bp, synthetic construct
  misc_feature 1..1029: note = variant of RNA ligase 2 from Escherichia phage RB69 (Bacteriophage RB69)
  source 1..1029: mol_type = other DNA
atgcatcaccatcaccatcacggtggcagcggtatgtttaagaaatattctagtctggaaaaccattacaatagcaaattcattgagaaactctatgctaacggcttaactgatggtgtatgggttgcgcgcgaaaagatccacgggacgaacttttcgctgattatcgagcgtgataatgtaacatgcgccaaacgtacaggcccgattaagcctaccgaaaccttctacggttatgaaatcgtcctgaagaaatacgataaagcgattaagacggtgcaggtgtctatgtataccgccggcgccgtttcctaccaagtgttcggagaatttgctggcaacggtatctggaaaggggtcgattatggcgagaaagacttctatgtgtttgatattctgatcaatgcggaatcaggagacaacacgtacctgactgattatgaaatgcaggacttctgtaatgaatttgggtttaagatggcaccaatgcttggtcgcggcgccttcgatagcctgattatgattccgaacgatttcgattcggttctcatggcttacaatgcaaccgcgaaagaggacctggtaaaagcgaacaactgcgtctttgatgccaatgtgatcggtgataacactgctgaaggctatgttcttaaaccgtgtgaacccaaatggttaccgaatgggacgcgtgtggcgatcaaatgcaagaactccaaattcagcgagaagaagaaaagtgacaaaccgatcaagacacaagtcccactgacggaaattgataagaatctgctggacgtattggcctgttatgtcactttaaaccgcgtgaacaacgtgatctctaagattggaacagtgacgccgcatgattttgagaaagtaatgtggctgactgttgaagatattctggaagaaacgtcacgtgagggtattgttctgacgacatcggacaatcctgacctcgtcaagaaagaacttgtccgcatggtgcaggatgtgttaaaatcggcctggcgcgaactggtgtcg

SEQ ID NO: 664 - protein, 343 aa, synthetic construct
  REGION 1..343: note = variant of RNA ligase 2 from Escherichia phage RB69 (Bacteriophage RB69)
MHHHHHHGGSGMFKKYSSLENHYNSKFIEKLYANGLTDGVWVAREKIHGTNFSLIIERDNVTCAKRTGPIKPTETFYGYEIVLKKYDKAIKTVQVSMYTAGAVSYQVFGEFAGNGIWKGVDYGEKDFYVFDILINAESGDNTYLTDYEMQDFCNEFGFKMAPMLGRGAFDSLIMIPNDFDSVLMAYNATAKEDLVKANNCVFDANVIGDNTAEGYVLKPCEPKWLPNGTRVAIKCKNSKFSEKKKSDKPIKTQVPLTEIDKNLLDVLACYVTLNRVNNVISKIGTVTPHDFEKVMWLTVEDILEETSREGIVLTTSDNPDLVKKELVRMVQDVLKSAWRELVS

SEQ ID NO: 665 - DNA, 1029 bp, synthetic construct
  misc_feature 1..1029: note = variant of RNA ligase 2 from Escherichia phage RB69 (Bacteriophage RB69)
  source 1..1029: mol_type = other DNA
atgcatcaccatcaccatcacggtggcagcggtatgtttaagaaatattctagtctggaaaaccattacaatagcaaattcattgagaaactctatgctaacggcttaactgatggtgtatgggttgcgcgcgaaaagatccacgggacgaacttttcgctgattatcgagcgtgataatgtaacatgcgccaaacgtacaggcccgattaagcctaccgaaaccttctacggttatgaaatcgtcctgaagaaatacgataaagcgattaagacggtgcagaaatctatgtataccgccggcgccgtttcctaccaagtgttcggagaatttgctggcaacggtatctggaaaggggtcgattatggcgagaaagacttctatgtgtttgatattctgatcaatgcggaatcaggagacaacacgtacctgactgattatgaaatgcaggacttctgtaatgaatatgggtttaagatggcaccaatgcttggtcgcggcaccttcgatagcctgattatgattccgaacgatttcgattcggttctcatggcttacaatgcaaccgcgaaagaggacctggtaaaagcgaacaacagcgtctttgatgccaatgtgatcggtgataacactgctgaaggctatgttcttaaaccgtgtgaacccaaatggttaccgaatgggacgcgtgtggcgatcaaatgcaagaactccaaattcagcgagaagaagaaaagtgacaaaccgatcaagacacaagtcccactgacggaaattgataagaatctgctggacgtattggcctgttatgtcactttaaaccgcgtgaacaacgtgatctctaagattggaacagtgacgccgcatgattttgagaaagtaatgtggctgactgttgaagatattctggaagaaacgtcacgtgagggtattgttctgacgacatcggacaatcctgacctcgtcaagaaagaacttgtccgcatggtgcaggatgtgttaaaatcgggctggcgcgaactggtgtcg

SEQ ID NO: 666 - protein, 343 aa, synthetic construct
  REGION 1..343: note = variant of RNA ligase 2 from Escherichia phage RB69 (Bacteriophage RB69)
MHHHHHHGGSGMFKKYSSLENHYNSKFIEKLYANGLTDGVWVAREKIHGTNFSLIIERDNVTCAKRTGPIKPTETFYGYEIVLKKYDKAIKTVQKSMYTAGAVSYQVFGEFAGNGIWKGVDYGEKDFYVFDILINAESGDNTYLTDYEMQDFCNEYGFKMAPMLGRGTFDSLIMIPNDFDSVLMAYNATAKEDLVKANNSVFDANVIGDNTAEGYVLKPCEPKWLPNGTRVAIKCKNSKFSEKKKSDKPIKTQVPLTEIDKNLLDVLACYVTLNRVNNVISKIGTVTPHDFEKVMWLTVEDILEETSREGIVLTTSDNPDLVKKELVRMVQDVLKSGWRELVS

SEQ ID NO: 667 - DNA, 1029 bp, synthetic construct
  misc_feature 1..1029: note = variant of RNA ligase 2 from Escherichia phage RB69 (Bacteriophage RB69)
  source 1..1029: mol_type = other DNA
atgcatcaccatcaccatcacggtggcagcggtatgtttaagaaatattctagtctggaaaaccattacaatagcaaattcattgagaaactctatgctaacggcttaactgatggtgtatgggttgcgcgcgaaaagatccacgggacgaacttttcgctgattatcgagcgtgataatgtaacatgcgccaaacgtacaggcccgattaagcctaccgaaaccttctacggttatgaaatcgtcctgaagaaatacgataaagcgattaagacggtgcagaaatctatgtataccgccggcgccgtttcctaccaagtgttcggagaatttgctggcaacggtatctggaaaggggtcgattatggcgagaaagacttctatgtgtttgatattctgatcaatgcggaatcaggagacaacacgtacctgactgattatgaaatgcaggacttctgtaatgaatgtgggtttaagatggcaccaatgcttggtcgcggcaccttcgatagcctgattatgattccgaacgatttcgattcggttctcatggcttacaatgcaacggcgaaagaggacctggtaaaagcgaacaactgcgtctttgatgccaatgtgatcggtgataacactgctgaaggctatgttcttaaaccgtgtgaacccaaatggttaccgaatgggacgcgtgtggcgatcaaatgcaagaactccaaattcagcgagaagaagaaaagtgacaaaccgatcaagacacaagtcccactgacggaaattgataagaatctgctggacgtattggcctgttatgttactttaaaccgcgtgaacaacgtgatctctaagattggaacagtgacgccggccgattttgagaaagtaatgtggctgactgttcaagatattctggaagaaacgtcacgtgagggtattgttctgacgacatcggacaatcctgacctcgtcaagaaagaacttgtccgcatggtgcaggatgagttaaaatcgggctggcgcgaactggtgtcg

SEQ ID NO: 668 - protein, 343 aa, synthetic construct
  REGION 1..343: note = variant of RNA ligase 2 from Escherichia phage RB69 (Bacteriophage RB69)
MHHHHHHGGSGMFKKYSSLENHYNSKFIEKLYANGLTDGVWVAREKIHGTNFSLIIERDNVTCAKRTGPIKPTETFYGYEIVLKKYDKAIKTVQKSMYTAGAVSYQVFGEFAGNGIWKGVDYGEKDFYVFDILINAESGDNTYLTDYEMQDFCNECGFKMAPMLGRGTFDSLIMIPNDFDSVLMAYNATAKEDLVKANNCVFDANVIGDNTAEGYVLKPCEPKWLPNGTRVAIKCKNSKFSEKKKSDKPIKTQVPLTEIDKNLLDVLACYVTLNRVNNVISKIGTVTPADFEKVMWLTVQDILEETSREGIVLTTSDNPDLVKKELVRMVQDELKSGWRELVS

SEQ ID NO: 669 - DNA, 1029 bp, synthetic construct
  misc_feature 1..1029: note = variant of RNA ligase 2 from Escherichia phage RB69 (Bacteriophage RB69)
  source 1..1029: mol_type = other DNA
atgcatcaccatcaccatcacggtggcagcggtatgtttaagaaatattctagtctggaaaaccattacaatagcaaattcattgagaaactctatgctaacggcttaactgatggtgtatgggttgcgcgcgaaaagatccacgggacgaacttttcgctgattatcgagcgtgataatgtaacatgcgccaaacgtacaggcccgattaagcctaccgaaaccttctacggttatgaaatcgtcctgaagaaatacgataaagcgattaagacggtgcaggtgtctatgtataccgccggcgccgtttcctaccaagtgttcggagaatttgctggcaacggtatctggaaaggggtcgattatggcgagaaagacttctatgtgtttgatattctgatcaatgcggaatcaggagacaacacgtacctgactgattatgaaatgcaggacttctgtaatgaatgtgggtttaagatggcaccaatgcttggtcgcggcaccttcgatagcctgattatgattccgaacgatttcgattcggttctcatggcttacaatgcagtggcgaaagaggacctggtaaaagcgaacaacaccgtctttgatgccaatgtgatcggtgataacactgctgaaggctatgttcttaaaccgtgtgaacccaaatggttaccgaatgggacgcgtgtggcgatcaaatgcaagaactccaaattcagcgagaagaagaaaagtgacaaaccgatcaagacacaagtcccactgacggaaattgataagaatctgctggacgtattggcctgttatgtcactttaaaccgcgtgaacaacgtgatctctaagattggaacagtgacgccgcatgattttgagaaagtaatgtggctgactgttgaagatattctggaagaaacgtcacgtgagggtattgttctgacgacatcggacaatcctgacctcgtcaagaaagaacttgtccgcatggtgcaggatgtgttaaaatcgggctggcgcgaactggtgtcg

SEQ ID NO: 670 - protein, 343 aa, synthetic construct
  REGION 1..343: note = variant of RNA ligase 2 from Escherichia phage RB69 (Bacteriophage RB69)
MHHHHHHGGSGMFKKYSSLENHYNSKFIEKLYANGLTDGVWVAREKIHGTNFSLIIERDNVTCAKRTGPIKPTETFYGYEIVLKKYDKAIKTVQVSMYTAGAVSYQVFGEFAGNGIWKGVDYGEKDFYVFDILINAESGDNTYLTDYEMQDFCNECGFKMAPMLGRGTFDSLIMIPNDFDSVLMAYNAVAKEDLVKANNTVFDANVIGDNTAEGYVLKPCEPKWLPNGTRVAIKCKNSKFSEKKKSDKPIKTQVPLTEIDKNLLDVLACYVTLNRVNNVISKIGTVTPHDFEKVMWLTVEDILEETSREGIVLTTSDNPDLVKKELVRMVQDVLKSGWRELVS

SEQ ID NO: 671 - DNA, 1029 bp, synthetic construct
  misc_feature 1..1029: note = variant of RNA ligase 2 from Escherichia phage RB69 (Bacteriophage RB69)
  source 1..1029: mol_type = other DNA
atgcatcaccatcaccatcacggtggcagcggtatgtttaagaaatattctagtctggaaaaccattacaatagcaaattcattgagaaactctatgctaacggcttaactgatggtgtatgggttgcgcgcgaaaagatccacgggacgaacttttcgctgattatcgagcgtgataatgtaacatgcgccaaacgtacaggcccgattaagcctaccgaaaccttctacggttatgaaatcgtcctgaagaaatacgataaagcgattaagacggtgcaggtgtctatgtataccgccggcgccgtttcctaccaagtgttcggagaatttgctggcaacggtatctggaaaggggtcgattatggcgagaaagacttctatgtgtttgatattctgatcaatgcggaatcaggagacaacacgtacctgactgattatgaaatgcaggacttctgtaatgaatttgggtttaagatggcaccaatgcttggtcgcggcaccttcgatagcctgattatgattccgaacgatttcgattcggttctcatggcttacaatgcagtggcgaaagaggacctggtaaaagcgaacaacaccgtctttgatgccaatgtgatcggtgataacactgctgaaggctatgttcttaaaccgtgtgaacccaaatggttaccgaatgggacgcgtgtggcgatcaaatgcaagaactccaaattcagcgagaagaagaaaagtgacaaaccgatcaagacacaagtcccactgacggaaattgataagaatctgctggacgtattggcctgttatattactttaaaccgcgtgaacaacgtgatctctaagattggaacagtgacgccgcatgattttgagaaagtaatgtggctgactgttcaggatattctggaagaaacgtcacgtgagggtattgttctgacgacatcggacaatcctgacctcgtcaagaaagaacttgtccgcatggtgcaggatgagttaaaatcggcctggcgcgaactggtgtcg

SEQ ID NO: 672 - protein, 343 aa, synthetic construct
  REGION 1..343: note = variant of RNA ligase 2 from Escherichia phage RB69 (Bacteriophage RB69)
MHHHHHHGGSGMFKKYSSLENHYNSKFIEKLYANGLTDGVWVAREKIHGTNFSLIIERDNVTCAKRTGPIKPTETFYGYEIVLKKYDKAIKTVQVSMYTAGAVSYQVFGEFAGNGIWKGVDYGEKDFYVFDILINAESGDNTYLTDYEMQDFCNEFGFKMAPMLGRGTFDSLIMIPNDFDSVLMAYNAVAKEDLVKANNTVFDANVIGDNTAEGYVLKPCEPKWLPNGTRVAIKCKNSKFSEKKKSDKPIKTQVPLTEIDKNLLDVLACYITLNRVNNVISKIGTVTPHDFEKVMWLTVQDILEETSREGIVLTTSDNPDLVKKELVRMVQDELKSAWRELVS

SEQ ID NO: 673 - DNA, 1029 bp, synthetic construct
  misc_feature 1..1029: note = variant of RNA ligase 2 from Escherichia phage RB69 (Bacteriophage RB69)
  source 1..1029: mol_type = other DNA
atgcatcaccatcaccatcacggtggcagcggtatgtttaagaaatattctagtctggaaaaccattacaatagcaaattcattgagaaactctatgctaacggcttaactgatggtgtatgggttgcgcgcgaaaagatccacgggacgaacttttcgctgattatcgagcgtgataatgtaacatgcgccaaacgtacaggcccgattaagcctaccgaaaccttctacggttatgaaatcgtcctgaagaaatacgataaagcgattaagacggtgcagaaatctatgtataccgccggcgccgtttcctaccaagtgttcggagaatttgctggcaacggtatctggaaaggggtcgattatggcgagaaagacttctatgtgtttgatattctgatcaatgcggaatcaggagacaacacgtacctgactgattatgaaatgcaggacttctgtaatgaatgtgggtttaagatggcaccaatgcttggtcgcggcaccttcgatagcctgattatgattccgaacgatttcgattcggttctcatggcttacaatgcaacggcgaaagaggacctggtaaaagcgaacaacagcgtctttgatgccaatgtgatcggtgataacactgctgaaggctatgttcttaaaccgtgtgaacccaaatggttaccgaatgggacgcgtgtggcgatcaaatgcaagaactccaaattcagcgagaagaagaaaagtgacaaaccgatcaagacacaagtcccactgacggaaattgataagaatctgctggacgtattggcctgttatattactttaaaccgcgtgaacaacgtgatctctaagattggaacagtgacgccggccgattttgagaaagtaatgtggctgactgttgaagatattctggaagaaacgtcacgtgagggtattgttctgacgacatcggacaatcctgacctcgtcaagaaagaacttgtccgcatggtgcaggatgtgttaaaatcggcatggcgcgaactggtgtcg

SEQ ID NO: 674 - protein, 343 aa, synthetic construct
  REGION 1..343: note = variant of RNA ligase 2 from Escherichia phage RB69 (Bacteriophage RB69)
MHHHHHHGGSGMFKKYSSLENHYNSKFIEKLYANGLTDGVWVAREKIHGTNFSLIIERDNVTCAKRTGPIKPTETFYGYEIVLKKYDKAIKTVQKSMYTAGAVSYQVFGEFAGNGIWKGVDYGEKDFYVFDILINAESGDNTYLTDYEMQDFCNECGFKMAPMLGRGTFDSLIMIPNDFDSVLMAYNATAKEDLVKANNSVFDANVIGDNTAEGYVLKPCEPKWLPNGTRVAIKCKNSKFSEKKKSDKPIKTQVPLTEIDKNLLDVLACYITLNRVNNVISKIGTVTPADFEKVMWLTVEDILEETSREGIVLTTSDNPDLVKKELVRMVQDVLKSAWRELVS

SEQ ID NO: 675 - DNA, 1029 bp, synthetic construct
  misc_feature 1..1029: note = variant of RNA ligase 2 from Escherichia phage RB69 (Bacteriophage RB69)
  source 1..1029: mol_type = other DNA
atgcatcaccatcaccatcacggtggcagcggtatgtttaagaaatattctagtctggaaaaccattacaatagcaaattcattgagaaactctatgctaacggcttaactgatggtgtatgggttgcgcgcgaaaagatccacgggacgaacttttcgctgattatcgagcgtgataatgtaacatgcgccaaacgtacaggcccgattaagcctaccgaaaccttctacggttatgaaatcgtcctgaagaaatacgataaagcgattaagacggtgcagaaatctatgtataccgccggcgccgtttcctaccaagtgttcggagaatttgctggcaacggtatctggaaaggggtcgattatggcgagaaagacttctatgtgtttgatattctgatcaatgcggaatcaggagacaacacgtacctgactgattatgaaatgcaggacttctgtaatgaatgtgggtttaagatggcaccaatgcttggtcgcggcacattcgatagcctgattatgattccgaacgatttcgattcggttctcatggcttacaatgcaacggcgaaagaggacctggtaaaagcgaacaactgcgtctttgatgccaatgtgatcggtgataacactgctgaaggctatgttcttaaaccgtgtgaacccaaatggttaccgaatgggacgcgtgtggcgatcaaatgcaagaactccaaattcagcgagaagaagaaaagtgacaaaccgatcaagacacaagtcccactgacggaaattgataagaatctgctggacgtattggcctgttatgtcactttaaaccgcgtgaacaacgtgatctctaagattggaacagtgacgccggccgattttgagaaagtaatgtggctgactgttcaggatattctggaagaaacgtcacgtgagggtattgttctgacgacatcggacaatcctgacctcgtcaagaaagaacttgtccgcatggtgcaggatgagttaaaatcggcctggcgcgaactggtgtcg

SEQ ID NO: 676 - protein, 343 aa, synthetic construct
  REGION 1..343: note = variant of RNA ligase 2 from Escherichia phage RB69 (Bacteriophage RB69)
MHHHHHHGGSGMFKKYSSLENHYNSKFIEKLYANGLTDGVWVAREKIHGTNFSLIIERDNVTCAKRTGPIKPTETFYGYEIVLKKYDKAIKTVQKSMYTAGAVSYQVFGEFAGNGIWKGVDYGEKDFYVFDILINAESGDNTYLTDYEMQDFCNECGFKMAPMLGRGTFDSLIMIPNDFDSVLMAYNATAKEDLVKANNCVFDANVIGDNTAEGYVLKPCEPKWLPNGTRVAIKCKNSKFSEKKKSDKPIKTQVPLTEIDKNLLDVLACYVTLNRVNNVISKIGTVTPADFEKVMWLTVQDILEETSREGIVLTTSDNPDLVKKELVRMVQDELKSAWRELVS

SEQ ID NO: 677 - DNA, 1029 bp, synthetic construct
  misc_feature 1..1029: note = variant of RNA ligase 2 from Escherichia phage RB69 (Bacteriophage RB69)
  source 1..1029: mol_type = other DNA
atgcatcaccatcaccatcacggtggcagcggtatgtttaagaaatattctagtctggaaaaccattacaatagcaaattcattgagaaactctatgctaacggcttaactgatggtgtatgggttgcgcgcgaaaagatccacgggacgaacttttcgctgattatcgagcgtgataatgtaacatgcgccaaacgtacaggcccgattaagcctaccgaaaccttctacggttatgaaatcgtcctgaagaaatacgataaagcgattaagacggtgcagaaatctatgtataccgccggcgccgtttcctaccaagtgttcggagaatttgctggcaacggtatctggaaaggggtcgattatggcgagaaagacttctatgtgtttgatattctgatcaatgcggaatcaggagacaacacgtacctgactgattatgaaatgcaggacttctgtaatgaatgtgggtttaagatggcaccaatgcttggtcgcggcacattcgatagcctgattatgattccgaacgatttcgattcggttctcatggcttacaatgcagtggcgaaagaggacctggtaaaagcgaacaactgcgtctttgatgccaatgtgatcggtgataacactgctgaaggctatgttcttaaaccgtgtgaacccaaatggttaccgaatgggacgcgtgtggcgatcaaatgcaagaactccaaattcagcgagaagaagaaaagtgacaaaccgatcaagacacaagtcccactgacggaaattgataagaatctgctggacgtattggcctgttatattactttaaaccgcgtgaacaacgtgatctctaagattggaacagtgacgccgcatgattttgagaaagtaatgtggctgactgttgaagatattctggaagaaacgtcacgtgagggtattgttctgacgacatcggacaatcctgacctcgtcaagaaagaacttgtccgcatggtgcaggatgtgttaaaatcggcatggcgcgaactggtgtcg

SEQ ID NO: 678 - protein, 343 aa, synthetic construct
  REGION 1..343: note = variant of RNA ligase 2 from Escherichia phage RB69 (Bacteriophage RB69)
MHHHHHHGGSGMFKKYSSLENHYNSKFIEKLYANGLTDGVWVAREKIHGTNFSLIIERDNVTCAKRTGPIKPTETFYGYEIVLKKYDKAIKTVQKSMYTAGAVSYQVFGEFAGNGIWKGVDYGEKDFYVFDILINAESGDNTYLTDYEMQDFCNECGFKMAPMLGRGTFDSLIMIPNDFDSVLMAYNAVAKEDLVKANNCVFDANVIGDNTAEGYVLKPCEPKWLPNGTRVAIKCKNSKFSEKKKSDKPIKTQVPLTEIDKNLLDVLACYITLNRVNNVISKIGTVTPHDFEKVMWLTVEDILEETSREGIVLTTSDNPDLVKKELVRMVQDVLKSAWRELVS

SEQ ID NO: 679 - DNA, 1029 bp, synthetic construct
  misc_feature 1..1029: note = variant of RNA ligase 2 from Escherichia phage RB69 (Bacteriophage RB69)
  source 1..1029: mol_type = other DNA
atgcatcaccatcaccatcacggtggcagcggtatgtttaagaaatattctagtctggaaaaccattacaatagcaaattcattgagaaactctatgctaacggcttaactgatggtgtatgggttgcgcgcgaaaagatccacgggacgaacttttcgctgattatcgagcgtgataatgtaacatgcgccaaacgtacaggcccgattaagcctaccgaaaccttctacggttatgaaatcgtcctgaagaaatacgataaagcgattaagacggtgcaggtgtctatgtataccgccggcgccgtttcctaccaagtgttcggagaatttgctggcaacggtatctggaaaggggtcgattatggcgagaaagacttctatgtgtttgatattctgatcaatgcggaatcaggagacaacacgtacctgactgattatgaaatgcaggacttctgtaatgaatgtgggtttaagatggcaccaatgcttggtcgcggcacattcgatagcctgattatgattccgaacgatttcgattcggttctcatggcttacaatgcaaccgcgaaagaggacctggtaaaagcgaacaactgcgtctttgatgccaatgtgatcggtgataacactgctgaaggctatgttcttaaaccgtgtgaacccaaatggttaccgaatgggacgcgtgtggcgatcaaatgcaagaactccaaattcagcgagaagaagaaaagtgacaaaccgatcaagacacaagtcccactgacggaaattgataagaatctgctggacgtattggcctgttatgtcactttaaaccgcgtgaacaacgtgatctctaagattggaacagtgacgccgcatgattttgagaaagtaatgtggctgactgttgaagatattctggaagaaacgtcacgtgagggtattgttctgacgacatcggacaatcctgacctcgtcaagaaagaacttgtccgcatggtgcaggatgtgttaaaatcggcatggcgcgaactggtgtcg

SEQ ID NO: 680 - protein, 343 aa, synthetic construct
  REGION 1..343: note = variant of RNA ligase 2 from Escherichia phage RB69 (Bacteriophage RB69)
MHHHHHHGGSGMFKKYSSLENHYNSKFIEKLYANGLTDGVWVAREKIHGTNFSLIIERDNVTCAKRTGPIKPTETFYGYEIVLKKYDKAIKTVQVSMYTAGAVSYQVFGEFAGNGIWKGVDYGEKDFYVFDILINAESGDNTYLTDYEMQDFCNECGFKMAPMLGRGTFDSLIMIPNDFDSVLMAYNATAKEDLVKANNCVFDANVIGDNTAEGYVLKPCEPKWLPNGTRVAIKCKNSKFSEKKKSDKPIKTQVPLTEIDKNLLDVLACYVTLNRVNNVISKIGTVTPHDFEKVMWLTVEDILEETSREGIVLTTSDNPDLVKKELVRMVQDVLKSAWRELVS

SEQ ID NO: 681 - DNA, 1029 bp, synthetic construct
  misc_feature 1..1029: note = variant of RNA ligase 2 from Escherichia phage RB69 (Bacteriophage RB69)
  source 1..1029: mol_type = other DNA
atgcatcaccatcaccatcacggtggcagcggtatgtttaagaaatattctagtctggaaaaccattacaatagcaaattcattgagaaactctatgctaacggcttaactgatggtgtatgggttgcgcgcgaaaagatccacgggacgaacttttcgctgattatcgagcgtgataatgtaacatgcgccaaacgtacaggcccgattaagcctaccgaaaccttctacggttatgaaatcgtcctgaagaaatacgataaagcgattaagacggtgcaggtgtctatgtataccgccggcgccgtttcctaccaagtgttcggagaatttgctggcaacggtatctggaaaggggtcgattatggcgagaaagacttctatgtgtttgatattctgatcaatgcggaatcaggagacaacacgtacctgactgattatgaaatgcaggacttctgtaatgaatgtgggtttaagatggcaccaatgcttggtcgcggcaccttcgatagcctgattatgattccgaacgatttcgattcggttctcatggcttacaatgcagtggcgaaagaggacctggtaaaagcgaacaactgcgtctttgatgccaatgtgatcggtgataacactgctgaaggctatgttcttaaaccgtgtgaacccaaatggttaccgaatgggacgcgtgtggcgatcaaatgcaagaactccaaattcagcgagaagaagaaaagtgacaaaccgatcaagacacaagtcccactgacggaaattgataagaatctgctggacgtattggcctgttatgtcactttaaaccgcgtgaacaacgtgatctctaagattggaacagtgacgccgcatgattttgagaaagtaatgtggctgactgttcaagatattctggaagaaacgtcacgtgagggtattgttctgacgacatcggacaatcctgacctcgtcaagaaagaacttgtccgcatggtgcaggatgagttaaaatcgggctggcgcgaactggtgtcg

SEQ ID NO: 682 - protein, 343 aa, synthetic construct
  REGION 1..343: note = variant of RNA ligase 2 from Escherichia phage RB69 (Bacteriophage RB69)
MHHHHHHGGSGMFKKYSSLENHYNSKFIEKLYANGLTDGVWVAREKIHGTNFSLIIERDNVTCAKRTGPIKPTETFYGYEIVLKKYDKAIKTVQVSMYTAGAVSYQVFGEFAGNGIWKGVDYGEKDFYVFDILINAESGDNTYLTDYEMQDFCNECGFKMAPMLGRGTFDSLIMIPNDFDSVLMAYNAVAKEDLVKANNCVFDANVIGDNTAEGYVLKPCEPKWLPNGTRVAIKCKNSKFSEKKKSDKPIKTQVPLTEIDKNLLDVLACYVTLNRVNNVISKIGTVTPHDFEKVMWLTVQDILEETSREGIVLTTSDNPDLVKKELVRMVQDELKSGWRELVS

SEQ ID NO: 683 - DNA, 1029 bp, synthetic construct
  misc_feature 1..1029: note = variant of RNA ligase 2 from Escherichia phage RB69 (Bacteriophage RB69)
  source 1..1029: mol_type = other DNA
atgcatcaccatcaccatcacggtggcagcggtatgtttaagaaatattctagtctggaaaaccattacaatagcaaattcattgagaaactctatgctaacggcttaactgatggtgtatgggttgcgcgcgaaaagatccacgggacgaacttttcgctgattatcgagcgtgataatgtaacatgcgccaaacgtacaggcccgattaagcctaccgaaaccttctacggttatgaaatcgtcctgaagaaatacgataaagcgattaagacggtgcaggtgtctatgtataccgccggcgccgtttcctaccaagtgttcggagaatttgctggcaacggtatctggaaaggggtcgattatggcgagaaagacttctatgtgtttgatattctgatcaatgcggaatcaggagacaacacgtacctgactgattatgaaatgcaggacttctgtaatgaatgtgggtttaagatggcaccaatgcttggtcgcggcacattcgatagcctgattatgattccgaacgatttcgattcggttctcatggcttacaatgcagtggcgaaagaggacctggtaaaagcgaacaactgcgtctttgatgccaatgtgatcggtgataacactgctgaaggctatgttcttaaaccgtgtgaacccaaatggttaccgaatgggacgcgtgtggcgatcaaatgcaagaactccaaattcagcgagaagaagaaaagtgacaaaccgatcaagacacaagtcccactgacggaaattgataagaatctgctggacgtattggcctgttatattactttaaaccgcgtgaacaacgtgatctctaagattggaacagtgacgccgcatgattttgagaaagtaatgtggctgactgttgaagatattctggaagaaacgtcacgtgagggtattgttctgacgacatcggacaatcctgacctcgtcaagaaagaacttgtccgcatggtgcaggatgtgttaaaatcggcatggcgcgaactggtgtcg

SEQ ID NO: 684 - protein, 343 aa, synthetic construct
  REGION 1..343: note = variant of RNA ligase 2 from Escherichia phage RB69 (Bacteriophage RB69)
MHHHHHHGGSGMFKKYSSLENHYNSKFIEKLYANGLTDGVWVAREKIHGTNFSLIIERDNVTCAKRTGPIKPTETFYGYEIVLKKYDKAIKTVQVSMYTAGAVSYQVFGEFAGNGIWKGVDYGEKDFYVFDILINAESGDNTYLTDYEMQDFCNECGFKMAPMLGRGTFDSLIMIPNDFDSVLMAYNAVAKEDLVKANNCVFDANVIGDNTAEGYVLKPCEPKWLPNGTRVAIKCKNSKFSEKKKSDKPIKTQVPLTEIDKNLLDVLACYITLNRVNNVISKIGTVTPHDFEKVMWLTVEDILEETSREGIVLTTSDNPDLVKKELVRMVQDVLKSAWRELVS

SEQ ID NO: 685 - DNA, 1029 bp, synthetic construct
  misc_feature 1..1029: note = variant of RNA ligase 2 from Escherichia phage RB69 (Bacteriophage RB69)
  source 1..1029: mol_type = other DNA
atgcatcaccatcaccatcacggtggcagcggtatgtttaagaaatattctagtctggaaaaccattacaatagcaaattcattgagaaactctatgctaacggcttaactgatggtgtatgggttgcgcgcgaaaagatccacgggacgaacttttcgctgattatcgagcgtgataatgtaacatgcgccaaacgtacaggcccgattaagcctaccgaaaccttctacggttatgaaatcgtcctgaagaaatacgataaagcgattaagacggtgcaggtgtctatgtataccgccggcgccgtttcctaccaagtgttcggagaatttgctggcaacggtatctggaaaggggtcgattatggcgagaaagacttctatgtgtttgatattctgatcaatgcggaatcaggagacaacacgtacctgactgattatgaaatgcaggacttctgtaatgaatgtgggtttaagatggcaccaatgcttggtcgcggcaccttcgatagcctgattatgattccgaacgatttcgattcggttctcatggcttacaatgcagtggcgaaagaggacctggtaaaagcgaacaacagcgtctttgatgccaatgtgatcggtgataacactgctgaaggctatgttcttaaaccgtgtgaacccaaatggttaccgaatgggacgcgtgtggcgatcaaatgcaagaactccaaattcagcgagaagaagaaaagtgacaaaccgatcaagacacaagtcccactgacggaaattgataagaatctgctggacgtattggcctgttatgtcactttaaaccgcgtgaacaacgtgatctctaagattggaacagtgacgccggccgattttgagaaagtaatgtggctgactgttcaggatattctggaagaaacgtcacgtgagggtattgttctgacgacatcggacaatcctgacctcgtcaagaaagaacttgtccgcatggtgcaggatgtgttaaaatcggcatggcgcgaactggtgtcg

SEQ ID NO: 686 - protein, 343 aa, synthetic construct
  REGION 1..343: note = variant of RNA ligase 2 from Escherichia phage RB69 (Bacteriophage RB69)
MHHHHHHGGSGMFKKYSSLENHYNSKFIEKLYANGLTDGVWVAREKIHGTNFSLIIERDNVTCAKRTGPIKPTETFYGYEIVLKKYDKAIKTVQVSMYTAGAVSYQVFGEFAGNGIWKGVDYGEKDFYVFDILINAESGDNTYLTDYEMQDFCNECGFKMAPMLGRGTFDSLIMIPNDFDSVLMAYNAVAKEDLVKANNSVFDANVIGDNTAEGYVLKPCEPKWLPNGTRVAIKCKNSKFSEKKKSDKPIKTQVPLTEIDKNLLDVLACYVTLNRVNNVISKIGTVTPADFEKVMWLTVQDILEETSREGIVLTTSDNPDLVKKELVRMVQDVLKSAWRELVS

SEQ ID NO: 687 - DNA, 1029 bp, synthetic construct
  misc_feature 1..1029: note = variant of RNA ligase 2 from Escherichia phage RB69 (Bacteriophage RB69)
  source 1..1029: mol_type = other DNA
atgcatcaccatcaccatcacggtggcagcggtatgtttaagaaatattctagtctggaaaaccattacaatagcaaattcattgagaaactctatgctaacggcttaactgatggtgtatgggttgcgcgcgaaaagatccacgggacgaacttttcgctgattatcgagcgtgataatgtaacatgcgccaaacgtacaggcccgattaagcctaccgaaaccttctacggttatgaaatcgtcctgaagaaatacgataaagcgattaagacggtgcagaaatctatgtataccgccggcgccgtttcctaccaagtgttcggagaatttgctggcaacggtatctggaaaggggtcgattatggcgagaaagacttctatgtgtttgatattctgatcaatgcggaatcaggagacaacacgtacctgactgattatgaaatgcaggacttctgtaatgaatgtgggtttaagatggcaccaatgcttggtcgcggcgccttcgatagcctgattatgattccgaacgatttcgattcggttctcatggcttacaatgcaacggcgaaagaggacctggtaaaagcgaacaactgcgtctttgatgccaatgtgatcggtgataacactgctgaaggctatgttcttaaaccgtgtgaacccaaatggttaccgaatgggacgcgtgtggcgatcaaatgcaagaactccaaattcagcgagaagaagaaaagtgacaaaccgatcaagacacaagtcccactgacggaaattgataagaatctgctggacgtattggcctgttatgtcactttaaaccgcgtgaacaacgtgatctctaagattggaacagtgacgccgcatgattttgagaaagtaatgtggctgactgttcaggatattctggaagaaacgtcacgtgagggtattgttctgacgacatcggacaatcctgacctcgtcaagaaagaacttgtccgcatggtgcaggatgtgttaaaatcggcatggcgcgaactggtgtcg

SEQ ID NO: 688 - protein, 343 aa, synthetic construct
  REGION 1..343: note = variant of RNA ligase 2 from Escherichia phage RB69 (Bacteriophage RB69)
MHHHHHHGGSGMFKKYSSLENHYNSKFIEKLYANGLTDGVWVAREKIHGTNFSLIIERDNVTCAKRTGPIKPTETFYGYEIVLKKYDKAIKTVQKSMYTAGAVSYQVFGEFAGNGIWKGVDYGEKDFYVFDILINAESGDNTYLTDYEMQDFCNECGFKMAPMLGRGAFDSLIMIPNDFDSVLMAYNATAKEDLVKANNCVFDANVIGDNTAEGYVLKPCEPKWLPNGTRVAIKCKNSKFSEKKKSDKPIKTQVPLTEIDKNLLDVLACYVTLNRVNNVISKIGTVTPHDFEKVMWLTVQDILEETSREGIVLTTSDNPDLVKKELVRMVQDVLKSAWRELVS

SEQ ID NO: 689 - DNA, 1029 bp, synthetic construct
  misc_feature 1..1029: note = variant of RNA ligase 2 from Escherichia phage RB69 (Bacteriophage RB69)
  source 1..1029: mol_type = other DNA
atgcatcaccatcaccatcacggtggcagcggtatgtttaagaaatattctagtctggaaaaccattacaatagcaaattcattgagaaactctatgctaacggcttaactgatggtgtatgggttgcgcgcgaaaagatccacgggacgaacttttcgctgattatcgagcgtgataatgtaacatgcgccaaacgtacaggcccgattaagcctaccgaaaccttctacggttatgaaatcgtcctgaagaaatacgataaagcgattaagacggtgcagaaatctatgtataccgccggcgccgtttcctaccaagtgttcggagaatttgctggcaacggtatctggaaaggggtcgattatggcgagaaagacttctatgtgtttgatattctgatcaatgcggaatcaggagacaacacgtacctgactgattatgaaatgcaggacttctgtaatgaatatgggtttaagatggcaccaatgcttggtcgcggcaccttcgatagcctgattatgattccgaacgatttcgattcggttctcatggcttacaatgcaaccgcgaaagaggacctggtaaaagcgaacaacagcgtctttgatgccaatgtgatcggtgataacactgctgaaggctatgttcttaaaccgtgtgaacccaaatggttaccgaatgggacgcgtgtggcgatcaaatgcaagaactccaaattcagcgagaagaagaaaagtgacaaaccgatcaagacacaagtcccactgacggaaattgataagaatctgctggacgtattggcctgttatattactttaaaccgcgtgaacaacgtgatctctaagattggaacagtgacgccgaaagattttgagaaagtaatgtggctgactgttcaggatattctggaagaaacgtcacgtgagggtattgttctgacgacatcggacaatcctgacctcgtcaagaaagaacttgtccgcatggtgcaggatgtgttaaaatcgggctggcgcgaactggtgtcg

SEQ ID NO: 690 - protein, 343 aa, synthetic construct
  REGION 1..343: note = variant of RNA ligase 2 from Escherichia phage RB69 (Bacteriophage RB69)
MHHHHHHGGSGMFKKYSSLENHYNSKFIEKLYANGLTDGVWVAREKIHGTNFSLIIERDNVTCAKRTGPIKPTETFYGYEIVLKKYDKAIKTVQKSMYTAGAVSYQVFGEFAGNGIWKGVDYGEKDFYVFDILINAESGDNTYLTDYEMQDFCNEYGFKMAPMLGRGTFDSLIMIPNDFDSVLMAYNATAKEDLVKANNSVFDANVIGDNTAEGYVLKPCEPKWLPNGTRVAIKCKNSKFSEKKKSDKPIKTQVPLTEIDKNLLDVLACYITLNRVNNVISKIGTVTPKDFEKVMWLTVQDILEETSREGIVLTTSDNPDLVKKELVRMVQDVLKSGWRELVS

SEQ ID NO: 691 - DNA, 1029 bp, synthetic construct
  misc_feature 1..1029: note = variant of RNA ligase 2 from Escherichia phage RB69 (Bacteriophage RB69)
  source 1..1029: mol_type = other DNA
atgcatcaccatcaccatcacggtggcagcggtatgtttaagaaatattctagtctggaaaaccattacaatagcaaattcattgagaaactctatgctaacggcttaactgatggtgtatgggttgcgcgcgaaaagatccacgggacgaacttttcgctgattatcgagcgtgataatgtaacatgcgccaaacgtacaggcccgattaagcctaccgaaaccttctacggttatgaaatcgtcctgaagaaatacgataaagcgattaagacggtgcaggtgtctatgtataccgccggcgccgtttcctaccaagtgttcggagaatttgctggcaacggtatctggaaaggggtcgattatggcgagaaagacttctatgtgtttgatattctgatcaatgcggaatcaggagacaacacgtacctgactgattatgaaatgcaggacttctgtaatgaatgtgggtttaagatggcaccaatgcttggtcgcggcgccttcgatagcctgattatgattccgaacgatttcgattcggttctcatggcttacaatgcaaccgcgaaagaggacctggtaaaagcgaacaactgcgtctttgatgccaatgtgatcggtgataacactgctgaaggctatgttcttaaaccgtgtgaacccaaatggttaccgaatgggacgcgtgtggcgatcaaatgcaagaactccaaattcagcgagaagaagaaaagtgacaaaccgatcaagacacaagtcccactgacggaaattgataagaatctgctggacgtattggcctgttatgttactttaaaccgcgtgaacaacgtgatctctaagattggaacagtgacgccgaccgattttgagaaagtaatgtggctgactgttcaggatattctggaagaaacgtcacgtgagggtattgttctgacgacatcggacaatcctgacctcgtcaagaaagaacttgtccgcatggtgcaggatgtgttaaaatcggcatggcgcgaactggtgtcg

SEQ ID NO: 692 - protein, 343 aa, synthetic construct
  REGION 1..343: note = variant of RNA ligase 2 from Escherichia phage RB69 (Bacteriophage RB69)
MHHHHHHGGSGMFKKYSSLENHYNSKFIEKLYANGLTDGVWVAREKIHGTNFSLIIERDNVTCAKRTGPIKPTETFYGYEIVLKKYDKAIKTVQVSMYTAGAVSYQVFGEFAGNGIWKGVDYGEKDFYVFDILINAESGDNTYLTDYEMQDFCNECGFKMAPMLGRGAFDSLIMIPNDFDSVLMAYNATAKEDLVKANNCVFDANVIGDNTAEGYVLKPCEPKWLPNGTRVAIKCKNSKFSEKKKSDKPIKTQVPLTEIDKNLLDVLACYVTLNRVNNVISKIGTVTPTDFEKVMWLTVQDILEETSREGIVLTTSDNPDLVKKELVRMVQDVLKSAWRELVS

SEQ ID NO: 693 - DNA, 1029 bp, synthetic construct
  misc_feature 1..1029: note = variant of RNA ligase 2 from Escherichia phage RB69 (Bacteriophage RB69)
  source 1..1029: mol_type = other DNA
atgcatcaccatcaccatcacggtggcagcggtatgtttaagaaatattctagtctggaaaaccattacaatagcaaattcattgagaaactctatgctaacggcttaactgatggtgtatgggttgcgcgcgaaaagatccacgggacgaacttttcgctgattatcgagcgtgataatgtaacatgcgccaaacgtacaggcccgattaagcctaccgaaaccttctacggttatgaaatcgtcctgaagaaatacgataaagcgattaagacggtgcagaaatctatgtataccgccggcgccgtttcctaccaagtgttcggagaatttgctggcaacggtatctggaaaggggtcgattatggcgagaaagacttctatgtgtttgatattctgatcaatgcggaatcaggagacaacacgtacctgactgattatgaaatgcaggacttctgtaatgaatttgggtttaagatggcaccaatgcttggtcgcggcaccttcgatagcctgattatgattccgaacgatttcgattcggttctcatggcttacaatgcaacggcgaaagaggacctggtaaaagcgaacaactgcgtctttgatgccaatgtgatcggtgataacactgctgaaggctatgttcttaaaccgtgtgaacccaaatggttaccgaatgggacgcgtgtggcgatcaaatgcaagaactccaaattcagcgagaagaagaaaagtgacaaaccgatcaagacacaagtcccactgacggaaattgataagaatctgctggacgtattggcctgttatgttactttaaaccgcgtgaacaacgtgatctctaagattggaacagtgacgccggccgattttgagaaagtaatgtggctgactgttcaagatattctggaagaaacgtcacgtgagggtattgttctgacgacatcggacaatcctgacctcgtcaagaaagaacttgtccgcatggtgcaggatgtgttaaaatcggcatggcgcgaactggtgtcg

SEQ ID NO: 694 - protein, 343 aa, synthetic construct
  REGION 1..343: note = variant of RNA ligase 2 from Escherichia phage RB69 (Bacteriophage RB69)
MHHHHHHGGSGMFKKYSSLENHYNSKFIEKLYANGLTDGVWVAREKIHGTNFSLIIERDNVTCAKRTGPIKPTETFYGYEIVLKKYDKAIKTVQKSMYTAGAVSYQVFGEFAGNGIWKGVDYGEKDFYVFDILINAESGDNTYLTDYEMQDFCNEFGFKMAPMLGRGTFDSLIMIPNDFDSVLMAYNATAKEDLVKANNCVFDANVIGDNTAEGYVLKPCEPKWLPNGTRVAIKCKNSKFSEKKKSDKPIKTQVPLTEIDKNLLDVLACYVTLNRVNNVISKIGTVTPADFEKVMWLTVQDILEETSREGIVLTTSDNPDLVKKELVRMVQDVLKSAWRELVS

SEQ ID NO: 695 - DNA, 1029 bp, synthetic construct
  misc_feature 1..1029: note = variant of RNA ligase 2 from Escherichia phage RB69 (Bacteriophage RB69)
  source 1..1029: mol_type = other DNA
atgcatcaccatcaccatcacggtggcagcggtatgtttaagaaatattctagtctggaaaaccattacaatagcaaattcattgagaaactctatgctaacggcttaactgatggtgtatgggttgcgcgcgaaaagatccacgggacgaacttttcgctgattatcgagcgtgataatgtaacatgcgccaaacgtacaggcccgattaagcctaccgaaaccttctacggttatgaaatcgtcctgaagaaatacgataaagcgattaagacggtgcaggtgtctatgtataccgccggcgccgtttcctaccaagtgttcggagaatttgctggcaacggtatctggaaaggggtcgattatggcgagaaagacttctatgtgtttgatattctgatcaatgcggaatcaggagacaacacgtacctgactgattatgaaatgcaggacttctgtaatgaatatgggtttaagatggcaccaatgcttggtcgcggcacattcgatagcctgattatgattccgaacgatttcgattcggttctcatggcttacaatgcagtggcgaaagaggacctggtaaaagcgaacaactgcgtctttgatgccaatgtgatcggtgataacactgctgaaggctatgttcttaaaccgtgtgaacccaaatggttaccgaatgggacgcgtgtggcgatcaaatgcaagaactccaaattcagcgagaagaagaaaagtgacaaaccgatcaagacacaagtcccactgacggaaattgataagaatctgctggacgtattggcctgttatattactttaaaccgcgtgaacaacgtgatctctaagattggaacagtgacgccgaaagattttgagaaagtaatgtggctgactgttcaggatattctggaagaaacgtcacgtgagggtattgttctgacgacatcggacaatcctgacctcgtcaagaaagaacttgtccgcatggtgcaggatgtgttaaaatcggcatggcgcgaactggtgtcg

SEQ ID NO: 696 - protein, 343 aa, synthetic construct
  REGION 1..343: note = variant of RNA ligase 2 from Escherichia phage RB69 (Bacteriophage RB69)
MHHHHHHGGSGMFKKYSSLENHYNSKFIEKLYANGLTDGVWVAREKIHGTNFSLIIERDNVTCAKRTGPIKPTETFYGYEIVLKKYDKAIKTVQVSMYTAGAVSYQVFGEFAGNGIWKGVDYGEKDFYVFDILINAESGDNTYLTDYEMQDFCNEYGFKMAPMLGRGTFDSLIMIPNDFDSVLMAYNAVAKEDLVKANNCVFDANVIGDNTAEGYVLKPCEPKWLPNGTRVAIKCKNSKFSEKKKSDKPIKTQVPLTEIDKNLLDVLACYITLNRVNNVISKIGTVTPKDFEKVMWLTVQDILEETSREGIVLTTSDNPDLVKKELVRMVQDVLKSAWRELVS

SEQ ID NO: 697 - DNA, 1029 bp, synthetic construct
  misc_feature 1..1029: note = variant of RNA ligase 2 from Escherichia phage RB69 (Bacteriophage RB69)
  source 1..1029: mol_type = other DNA
atgcatcaccatcaccatcacggtggcagcggtatgtttaagaaatattctagtctggaaaaccattacaatagcaaattcattgagaaactctatgctaacggcttaactgatggtgtatgggttgcgcgcgaaaagatccacgggacgaacttttcgctgattatcgagcgtgataatgtaacatgcgccaaacgtacaggcccgattaagcctaccgaaaccttctacggttatgaaatcgtcctgaagaaatacgataaagcgattaagacggtgcagaaatctatgtataccgccggcgccgtttcctaccaagtgttcggagaatttgctggcaacggtatctggaaaggggtcgattatggcgagaaagacttctatgtgtttgatattctgatcaatgcggaatcaggagacaacacgtacctgactgattatgaaatgcaggacttctgtaatgaatttgggtttaagatggcaccaatgcttggtcgcggcgccttcgatagcctgattatgattccgaacgatttcgattcggttctcatggcttacaatgcagtggcgaaagaggacctggtaaaagcgaacaacagcgtctttgatgccaatgtgatcggtgataacactgctgaaggctatgttcttaaaccgtgtgaacccaaatggttaccgaatgggacgcgtgtggcgatcaaatgcaagaactccaaattcagcgagaagaagaaaagtgacaaaccgatcaagacacaagtcccactgacggaaattgataagaatctgctggacgtattggcctgttatgttactttaaaccgcgtgaacaacgtgatctctaagattggaacagtgacgccggccgattttgagaaagtaatgtggctgactgttcaagatattctggaagaaacgtcacgtgagggtattgttctgacgacatcggacaatcctgacctcgtcaagaaagaacttgtccgcatggtgcaggatgagttaaaatcggcctggcgcgaactggtgtcg

SEQ ID NO: 698 - protein, 343 aa, synthetic construct
  REGION 1..343: note = variant of RNA ligase 2 from Escherichia phage RB69 (Bacteriophage RB69)
MHHHHHHGGSGMFKKYSSLENHYNSKFIEKLYANGLTDGVWVAREKIHGTNFSLIIERDNVTCAKRTGPIKPTETFYGYEIVLKKYDKAIKTVQKSMYTAGAVSYQVFGEFAGNGIWKGVDYGEKDFYVFDILINAESGDNTYLTDYEMQDFCNEFGFKMAPMLGRGAFDSLIMIPNDFDSVLMAYNAVAKEDLVKANNSVFDANVIGDNTAEGYVLKPCEPKWLPNGTRVAIKCKNSKFSEKKKSDKPIKTQVPLTEIDKNLLDVLACYVTLNRVNNVISKIGTVTPADFEKVMWLTVQDILEETSREGIVLTTSDNPDLVKKELVRMVQDELKSAWRELVS

SEQ ID NO: 699 - DNA, 1029 bp, synthetic construct
  misc_feature 1..1029: note = variant of RNA ligase 2 from Escherichia phage RB69 (Bacteriophage RB69)
  source 1..1029: mol_type = other DNA
atgcatcaccatcaccatcacggtggcagcggtatgtttaagaaatattctagtctggaaaaccattacaatagcaaattcattgagaaactctatgctaacggcttaactgatggtgtatgggttgcgcgcgaaaagatccacgggacgaacttttcgctgattatcgagcgtgataatgtaacatgcgccaaacgtacaggcccgattaagcctaccgaaaccttctacggttatgaaatcgtcctgaagaaatacgataaagcgattaagacggtgcagaaatctatgtataccgccggcgccgtttcctaccaagtgttcggagaatttgctggcaacggtatctggaaaggggtcgattatggcgagaaagacttctatgtgtttgatattctgatcaatgcggaatcaggagacaacacgtacctgactgattatgaaatgcaggacttctgtaatgaatttgggtttaagatggcaccaatgcttggtcgcggcacattcgatagcctgattatgattccgaacgatttcgattcggttctcatggcttacaatgcaaccgcgaaagaggacctggtaaaagcgaacaactgcgtctttgatgccaatgtgatcggtgataacactgctgaaggctatgttcttaaaccgtgtgaacccaaatggttaccgaatgggacgcgtgtggcgatcaaatgcaagaactccaaattcagcgagaagaagaaaagtgacaaaccgatcaagacacaagtcccactgacggaaattgataagaatctgctggacgtattggcctgttatgttactttaaaccgcgtgaacaacgtgatctctaagattggaacagtgacgccgcatgattttgagaaagtaatgtggctgactgttgaagatattctggaagaaacgtcacgtgagggtattgttctgacgacatcggacaatcctgacctcgtcaagaaagaacttgtccgcatggtgcaggatgagttaaaatcgggctggcgcgaactggtgtcg

SEQ ID NO: 700 - protein, 343 aa, synthetic construct
  REGION 1..343: note = variant of RNA ligase 2 from Escherichia phage RB69 (Bacteriophage RB69)
MHHHHHHGGSGMFKKYSSLENHYNSKFIEKLYANGLTDGVWVAREKIHGTNFSLIIERDNVTCAKRTGPIKPTETFYGYEIVLKKYDKAIKTVQKSMYTAGAVSYQVFGEFAGNGIWKGVDYGEKDFYVFDILINAESGDNTYLTDYEMQDFCNEFGFKMAPMLGRGTFDSLIMIPNDFDSVLMAYNATAKEDLVKANNCVFDANVIGDNTAEGYVLKPCEPKWLPNGTRVAIKCKNSKFSEKKKSDKPIKTQVPLTEIDKNLLDVLACYVTLNRVNNVISKIGTVTPHDFEKVMWLTVEDILEETSREGIVLTTSDNPDLVKKELVRMVQDELKSGWRELVS

SEQ ID NO: 701 - DNA, 1029 bp, synthetic construct
  misc_feature 1..1029: note = variant of RNA ligase 2 from Escherichia phage RB69 (Bacteriophage RB69)
  source 1..1029: mol_type = other DNA
atgcatcaccatcaccatcacggtggcagcggtatgtttaagaaatattctagtctggaaaaccattacaatagcaaattcattgagaaactctatgctaacggcttaactgatggtgtatgggttgcgcgcgaaaagatccacgggacgaacttttcgctgattatcgagcgtgataatgtaacatgcgccaaacgtacaggcccgattaagcctaccgaaaccttctacggttatgaaatcgtcctgaagaaatacgataaagcgattaagacggtgcaggtgtctatgtataccgccggcgccgtttcctaccaagtgttcggagaatttgctggcaacggtatctggaaaggggtcgattatggcgagaaagacttctatgtgtttgatattctgatcaatgcggaatcaggagacaacacgtacctgactgattatgaaatgcaggacttctgtaatgaatttgggtttaagatggcaccaatgcttggtcgcggcaccttcgatagcctgattatgattccgaacgatttcgattcggttctcatggcttacaatgcagtggcgaaagaggacctggtaaaagcgaacaacagcgtctttgatgccaatgtgatcggtgataacactgctgaaggctatgttcttaaaccgtgtgaacccaaatggttaccgaatgggacgcgtgtggcgatcaaatgcaagaactccaaattcagcgagaagaagaaaagtgacaaaccgatcaagacacaagtcccactgacggaaattgataagaatctgctggacgtattggcctgttatattactttaaaccgcgtgaacaacgtgatctctaagattggaacagtgacgccgcatgattttgagaaagtaatgtggctgactgttcaggatattctggaagaaacgtcacgtgagggtattgttctgacgacatcggacaatcctgacctcgtcaagaaagaacttgtccgcatggtgcaggatgtgttaaaatcgggctggcgcgaactggtgtcg

SEQ ID NO: 702 - protein, 343 aa, synthetic construct
  REGION 1..343: note = variant of RNA ligase 2 from Escherichia phage RB69 (Bacteriophage RB69)
MHHHHHHGGSGMFKKYSSLENHYNSKFIEKLYANGLTDGVWVAREKIHGTNFSLIIERDNVTCAKRTGPIKPTETFYGYEIVLKKYDKAIKTVQVSMYTAGAVSYQVFGEFAGNGIWKGVDYGEKDFYVFDILINAESGDNTYLTDYEMQDFCNEFGFKMAPMLGRGTFDSLIMIPNDFDSVLMAYNAVAKEDLVKANNSVFDANVIGDNTAEGYVLKPCEPKWLPNGTRVAIKCKNSKFSEKKKSDKPIKTQVPLTEIDKNLLDVLACYITLNRVNNVISKIGTVTPHDFEKVMWLTVQDILEETSREGIVLTTSDNPDLVKKELVRMVQDVLKSGWRELVS

SEQ ID NO: 703 - DNA, 1029 bp, synthetic construct
  misc_feature 1..1029: note = variant of RNA ligase 2 from Escherichia phage RB69 (Bacteriophage RB69)
  source 1..1029: mol_type = other DNA
atgcatcaccatcaccatcacggtggcagcggtatgtttaagaaatattctagtctggaaaaccattacaatagcaaattcattgagaaactctatgctaacggcttaactgatggtgtatgggttgcgcgcgaaaagatccacgggacgaacttttcgctgattatcgagcgtgataatgtaacatgcgccaaacgtacaggcccgattaagcctaccgaaaccttctacggttatgaaatcgtcctgaagaaatacgataaagcgattaagacggtgcagaaatctatgtataccgccggcgccgtttcctaccaagtgttcggagaatttgctggcaacggtatctggaaaggggtcgattatggcgagaaagacttctatgtgtttgatattctgatcaatgcggaatcaggagacaacacgtacctgactgattatgaaatgcaggacttctgtaatgaatttgggtttaagatggcaccaatgcttggtcgcggcacattcgatagcctgattatgattccgaacgatttcgattcggttctcatggcttacaatgcagtggcgaaagaggacctggtaaaagcgaacaacaccgtctttgatgccaatgtgatcggtgataacactgctgaaggctatgttcttaaaccgtgtgaacccaaatggttaccgaatgggacgcgtgtggcgatcaaatgcaagaactccaaattcagcgagaagaagaaaagtgacaaaccgatcaagacacaagtcccactgacggaaattgataagaatctgctggacgtattggcctgttatgttactttaaaccgcgtgaacaacgtgatctctaagattggaacagtgacgccgaaagattttgagaaagtaatgtggctgactgttcaggatattctggaagaaacgtcacgtgagggtattgttctgacgacatcggacaatcctgacctcgtcaagaaagaacttgtccgcatggtgcaggatgtgttaaaatcggcctggcgcgaactggtgtcg

SEQ ID NO: 704 - protein, 343 aa, synthetic construct
  REGION 1..343: note = variant of RNA ligase 2 from Escherichia phage RB69 (Bacteriophage RB69)
MHHHHHHGGSGMFKKYSSLENHYNSKFIEKLYANGLTDGVWVAREKIHGTNFSLIIERDNVTCAKRTGPIKPTETFYGYEIVLKKYDKAIKTVQKSMYTAGAVSYQVFGEFAGNGIWKGVDYGEKDFYVFDILINAESGDNTYLTDYEMQDFCNEFGFKMAPMLGRGTFDSLIMIPNDFDSVLMAYNAVAKEDLVKANNTVFDANVIGDNTAEGYVLKPCEPKWLPNGTRVAIKCKNSKFSEKKKSDKPIKTQVPLTEIDKNLLDVLACYVTLNRVNNVISKIGTVTPKDFEKVMWLTVQDILEETSREGIVLTTSDNPDLVKKELVRMVQDVLKSAWRELVS

SEQ ID NO: 705 - DNA, 1029 bp, synthetic construct
  misc_feature 1..1029: note = variant of RNA ligase 2 from Escherichia phage RB69 (Bacteriophage RB69)
  source 1..1029: mol_type = other DNA
atgcatcaccatcaccatcacggtggcagcggtatgtttaagaaatattctagtctggaaaaccattacaatagcaaattcattgagaaactctatgctaacggcttaactgatggtgtatgggttgcgcgcgaaaagatccacgggacgaacttttcgctgattatcgagcgtgataatgtaacatgcgccaaacgtacaggcccgattaagcctaccgaaaccttctacggttatgaaatcgtcctgaagaaatacgataaagcgattaagacggtgcagaaatctatgtataccgccggcgccgtttcctaccaagtgttcggagaatttgctggcaacggtatctggaaaggggtcgattatggcgagaaagacttctatgtgtttgatattctgatcaatgcggaatcaggagacaacacgtacctgactgattatgaaatgcaggacttctgtaatgaatatgggtttaagatggcaccaatgcttggtcgcggcaccttcgatagcctgattatgattccgaacgatttcgattcggttctcatggcttacaatgcaacggcgaaagaggacctggtaaaagcgaacaactgcgtctttgatgccaatgtgatcggtgataacactgctgaaggctatgttcttaaaccgtgtgaacccaaatggttaccgaatgggacgcgtgtggcgatcaaatgcaagaactccaaattcagcgagaagaagaaaagtgacaaaccgatcaagacacaagtcccactgacggaaattgataagaatctgctggacgtattggcctgttatgtcactttaaaccgcgtgaacaacgtgatctctaagattggaacagtgacgccgaccgattttgagaaagtaatgtggctgactgttcaggatattctggaagaaacgtcacgtgagggtattgttctgacgacatcggacaatcctgacctcgtcaagaaagaacttgtccgcatggtgcaggatgtgttaaaatcggcctggcgcgaactggtgtcg

SEQ ID NO: 706 - protein, 343 aa, synthetic construct
  REGION 1..343: note = variant of RNA ligase 2 from Escherichia phage RB69 (Bacteriophage RB69)
MHHHHHHGGSGMFKKYSSLENHYNSKFIEKLYANGLTDGVWVAREKIHGTNFSLIIERDNVTCAKRTGPIKPTETFYGYEIVLKKYDKAIKTVQKSMYTAGAVSYQVFGEFAGNGIWKGVDYGEKDFYVFDILINAESGDNTYLTDYEMQDFCNEYGFKMAPMLGRGTFDSLIMIPNDFDSVLMAYNATAKEDLVKANNCVFDANVIGDNTAEGYVLKPCEPKWLPNGTRVAIKCKNSKFSEKKKSDKPIKTQVPLTEIDKNLLDVLACYVTLNRVNNVISKIGTVTPTDFEKVMWLTVQDILEETSREGIVLTTSDNPDLVKKELVRMVQDVLKSAWRELVS

SEQ ID NO: 707 - DNA, 1029 bp, synthetic construct
  misc_feature 1..1029: note = variant of RNA ligase 2 from Escherichia phage RB69 (Bacteriophage RB69)
  source 1..1029: mol_type = other DNA
atgcatcaccatcaccatcacggtggcagcggtatgtttaagaaatattctagtctggaaaaccattacaatagcaaattcattgagaaactctatgctaacggcttaactgatggtgtatgggttgcgcgcgaaaagatccacgggacgaacttttcgctgattatcgagcgtgataatgtaacatgcgccaaacgtacaggcccgattaagcctaccgaaaccttctacggttatgaaatcgtcctgaagaaatacgataaagcgattaagacggtgcagaaatctatgtataccgccggcgccgtttcctaccaagtgttcggagaatttgctggcaacggtatctggaaaggggtcgattatggcgagaaagacttctatgtgtttgatattctgatcaatgcggaatcaggagacaacacgtacctgactgattatgaaatgcaggacttctgtaatgaatgtgggtttaagatggcaccaatgcttggtcgcggcacattcgatagcctgattatgattccgaacgatttcgattcggttctcatggcttacaatgcaaccgcgaaagaggacctggtaaaagcgaacaactgcgtctttgatgccaatgtgatcggtgataacactgctgaaggctatgttcttaaaccgtgtgaacccaaatggttaccgaatgggacgcgtgtggcgatcaaatgcaagaactccaaattcagcgagaagaagaaaagtgacaaaccgatcaagacacaagtcccactgacggaaattgataagaatctgctggacgtattggcctgttatattactttaaaccgcgtgaacaacgtgatctctaagattggaacagtgacgccgcatgattttgagaaagtaatgtggctgactgttcaggatattctggaagaaacgtcacgtgagggtattgttctgacgacatcggacaatcctgacctcgtcaagaaagaacttgtccgcatggtgcaggatgtgttaaaatcggcatggcgcgaactggtgtcg

SEQ ID NO: 708 - protein, 343 aa, synthetic construct
  REGION 1..343: note = variant of RNA ligase 2 from Escherichia phage RB69 (Bacteriophage RB69)
MHHHHHHGGSGMFKKYSSLENHYNSKFIEKLYANGLTDGVWVAREKIHGTNFSLIIERDNVTCAKRTGPIKPTETFYGYEIVLKKYDKAIKTVQKSMYTAGAVSYQVFGEFAGNGIWKGVDYGEKDFYVFDILINAESGDNTYLTDYEMQDFCNECGFKMAPMLGRGTFDSLIMIPNDFDSVLMAYNATAKEDLVKANNCVFDANVIGDNTAEGYVLKPCEPKWLPNGTRVAIKCKNSKFSEKKKSDKPIKTQVPLTEIDKNLLDVLACYITLNRVNNVISKIGTVTPHDFEKVMWLTVQDILEETSREGIVLTTSDNPDLVKKELVRMVQDVLKSAWRELVS

SEQ ID NO: 709 - DNA, 1029 bp, synthetic construct
  misc_feature 1..1029: note = variant of RNA ligase 2 from Escherichia phage RB69 (Bacteriophage RB69)
  source 1..1029: mol_type = other DNA
atgcatcaccatcaccatcacggtggcagcggtatgtttaagaaatattctagtctggaaaaccattacaatagcaaattcattgagaaactctatgctaacggcttaactgatggtgtatgggttgcgcgcgaaaagatccacgggacgaacttttcgctgattatcgagcgtgataatgtaacatgcgccaaacgtacaggcccgattaagcctaccgaaaccttctacggttatgaaatcgtcctgaagaaatacgataaagcgattaagacggtgcagaaatctatgtataccgccggcgccgtttcctaccaagtgttcggagaatttgctggcaacggtatctggaaaggggtcgattatggcgagaaagacttctatgtgtttgatattctgatcaatgcggaatcaggagacaacacgtacctgactgattatgaaatgcaggacttctgtaatgaatatgggtttaagatggcaccaatgcttggtcgcggcacattcgatagcctgattatgattccgaacgatttcgattcggttctcatggcttacaatgcaacggcgaaagaggacctggtaaaagcgaacaactgcgtctttgatgccaatgtgatcggtgataacactgctgaaggctatgttcttaaaccgtgtgaacccaaatggttaccgaatgggacgcgtgtggcgatcaaatgcaagaactccaaattcagcgagaagaagaaaagtgacaaaccgatcaagacacaagtcccactgacggaaattgataagaatctgctggacgtattggcctgttatattactttaaaccgcgtgaacaacgtgatctctaagattggaacagtgacgccgcatgattttgagaaagtaatgtggctgactgttcaggatattctggaagaaacgtcacgtgagggtattgttctgacgacatcggacaatcctgacctcgtcaagaaagaacttgtccgcatggtgcaggatgtgttaaaatcggcatggcgcgaactggtgtcg

SEQ ID NO: 710 - protein, 343 aa, synthetic construct
  REGION 1..343: note = variant of RNA ligase 2 from Escherichia phage RB69 (Bacteriophage RB69)
MHHHHHHGGSGMFKKYSSLENHYNSKFIEKLYANGLTDGVWVAREKIHGTNFSLIIERDNVTCAKRTGPIKPTETFYGYEIVLKKYDKAIKTVQKSMYTAGAVSYQVFGEFAGNGIWKGVDYGEKDFYVFDILINAESGDNTYLTDYEMQDFCNEYGFKMAPMLGRGTFDSLIMIPNDFDSVLMAYNATAKEDLVKANNCVFDANVIGDNTAEGYVLKPCEPKWLPNGTRVAIKCKNSKFSEKKKSDKPIKTQVPLTEIDKNLLDVLACYITLNRVNNVISKIGTVTPHDFEKVMWLTVQDILEETSREGIVLTTSDNPDLVKKELVRMVQDVLKSAWRELVS

SEQ ID NO: 711 - DNA, 1029 bp, synthetic construct
  misc_feature 1..1029: note = variant of RNA ligase 2 from Escherichia phage RB69 (Bacteriophage RB69)
  source 1..1029: mol_type = other DNA
atgcatcaccatcaccatcacggtggcagcggtatgtttaagaaatattctagtctggaaaaccattacaatagcaaattcattgagaaactctatgctaacggcttaactgatggtgtatgggttgcgcgcgaaaagatccacgggacgaacttttcgctgattatcgagcgtgataatgtaacatgcgccaaacgtacaggcccgattaagcctaccgaaaccttctacggttatgaaatcgtcctgaagaaatacgataaagcgattaagacggtgcagaaatctatgtataccgccggcgccgtttcctaccaagtgttcggagaatttgctggcaacggtatctggaaaggggtcgattatggcgagaaagacttctatgtgtttgatattctgatcaatgcggaatcaggagacaacacgtacctgactgattatgaaatgcaggacttctgtaatgaatttgggtttaagatggcaccaatgcttggtcgcggcacattcgatagcctgattatgattccgaacgatttcgattcggttctcatggcttacaatgcaaccgcgaaagaggacctggtaaaagcgaacaactgcgtctttgatgccaatgtgatcggtgataacactgctgaaggctatgttcttaaaccgtgtgaacccaaatggttaccgaatgggacgcgtgtggcgatcaaatgcaagaactccaaattcagcgagaagaagaaaagtgacaaaccgatcaagacacaagtcccactgacggaaattgataagaatctgctggacgtattggcctgttatattactttaaaccgcgtgaacaacgtgatctctaagattggaacagtgacgccgcatgattttgagaaagtaatgtggctgactgttgaagatattctggaagaaacgtcacgtgagggtattgttctgacgacatcggacaatcctgacctcgtcaagaaagaacttgtccgcatggtgcaggatgagttaaaatcggcctggcgcgaactggtgtcg

SEQ ID NO: 712 - protein, 343 aa, synthetic construct
  REGION 1..343: note = variant of RNA ligase 2 from Escherichia phage RB69 (Bacteriophage RB69)
MHHHHHHGGSGMFKKYSSLENHYNSKFIEKLYANGLTDGVWVAREKIHGTNFSLIIERDNVTCAKRTGPIKPTETFYGYEIVLKKYDKAIKTVQKSMYTAGAVSYQVFGEFAGNGIWKGVDYGEKDFYVFDILINAESGDNTYLTDYEMQDFCNEFGFKMAPMLGRGTFDSLIMIPNDFDSVLMAYNATAKEDLVKANNCVFDANVIGDNTAEGYVLKPCEPKWLPNGTRVAIKCKNSKFSEKKKSDKPIKTQVPLTEIDKNLLDVLACYITLNRVNNVISKIGTVTPHDFEKVMWLTVEDILEETSREGIVLTTSDNPDLVKKELVRMVQDELKSAWRELVS

SEQ ID NO: 713 - DNA, 1029 bp, synthetic construct
  misc_feature 1..1029: note = variant of RNA ligase 2 from Escherichia phage RB69 (Bacteriophage RB69)
  source 1..1029: mol_type = other DNA
atgcatcaccatcaccatcacggtggcagcggtatgtttaagaaatattctagtctggaaaaccattacaatagcaaattcattgagaaactctatgctaacggcttaactgatggtgtatgggttgcgcgcgaaaagatccacgggacgaacttttcgctgattatcgagcgtgataatgtaacatgcgccaaacgtacaggcccgattaagcctaccgaaaccttctacggttatgaaatcgtcctgaagaaatacgataaagcgattaagacggtgcaggtgtctatgtataccgccggcgccgtttcctaccaagtgttcggagaatttgctggcaacggtatctggaaaggggtcgattatggcgagaaagacttctatgtgtttgatattctgatcaatgcggaatcaggagacaacacgtacctgactgattatgaaatgcaggacttctgtaatgaatgtgggtttaagatggcaccaatgcttggtcgcggcgccttcgatagcctgattatgattccgaacgatttcgattcggttctcatggcttacaatgcaaccgcgaaagaggacctggtaaaagcgaacaacagcgtctttgatgccaatgtgatcggtgataacactgctgaaggctatgttcttaaaccgtgtgaacccaaatggttaccgaatgggacgcgtgtggcgatcaaatgcaagaactccaaattcagcgagaagaagaaaagtgacaaaccgatcaagacacaagtcccactgacggaaattgataagaatctgctggacgtattggcctgttatgtcactttaaaccgcgtgaacaacgtgatctctaagattggaacagtgacgccgcatgattttgagaaagtaatgtggctgactgttcaggatattctggaagaaacgtcacgtgagggtattgttctgacgacatcggacaatcctgacctcgtcaagaaagaacttgtccgcatggtgcaggatgtgttaaaatcggcatggcgcgaactggtgtcg

SEQ ID NO: 714 - protein, 343 aa, synthetic construct
  REGION 1..343: note = variant of RNA ligase 2 from Escherichia phage RB69 (Bacteriophage RB69)
MHHHHHHGGSGMFKKYSSLENHYNSKFIEKLYANGLTDGVWVAREKIHGTNFSLIIERDNVTCAKRTGPIKPTETFYGYEIVLKKYDKAIKTVQVSMYTAGAVSYQVFGEFAGNGIWKGVDYGEKDFYVFDILINAESGDNTYLTDYEMQDFCNECGFKMAPMLGRGAFDSLIMIPNDFDSVLMAYNATAKEDLVKANNSVFDANVIGDNTAEGYVLKPCEPKWLPNGTRVAIKCKNSKFSEKKKSDKPIKTQVPLTEIDKNLLDVLACYVTLNRVNNVISKIGTVTPHDFEKVMWLTVQDILEETSREGIVLTTSDNPDLVKKELVRMVQDVLKSAWRELVS

SEQ ID NO: 715 - DNA, 1029 bp, synthetic construct
  misc_feature 1..1029: note = variant of RNA ligase 2 from Escherichia phage RB69 (Bacteriophage RB69)
  source 1..1029: mol_type = other DNA
atgcatcaccatcaccatcacggtggcagcggtatgtttaagaaatattctagtctggaaaaccattacaatagcaaattcattgagaaactctatgctaacggcttaactgatggtgtatgggttgcgcgcgaaaagatccacgggacgaacttttcgctgattatcgagcgtgataatgtaacatgcgccaaacgtacaggcccgattaagcctaccgaaaccttctacggttatgaaatcgtcctgaagaaatacgataaagcgattaagacggtgcagaaatctatgtataccgccggcgccgtttcctaccaagtgttcggagaatttgctggcaacggtatctggaaaggggtcgattatggcgagaaagacttctatgtgtttgatattctgatcaatgcggaatcaggagacaacacgtacctgactgattatgaaatgcaggacttctgtaatgaatgtgggtttaagatggcaccaatgcttggtcgcggcaccttcgatagcctgattatgattccgaacgatttcgattcggttctcatggcttacaatgcagtggcgaaagaggacctggtaaaagcgaacaacagcgtctttgatgccaatgtgatcggtgataacactgctgaaggctatgttcttaaaccgtgtgaacccaaatggttaccgaatgggacgcgtgtggcgatcaaatgcaagaactccaaattcagcgagaagaagaaaagtgacaaaccgatcaagacacaagtcccactgacggaaattgataagaatctgctggacgtattggcctgttatgttactttaaaccgcgtgaacaacgtgatctctaagattggaacagtgacgccggccgattttgagaaagtaatgtggctgactgttcaggatattctggaagaaacgtcacgtgagggtattgttctgacgacatcggacaatcctgacctcgtcaagaaagaacttgtccgcatggtgcaggatgtgttaaaatcggcctggcgcgaactggtgtcg

SEQ ID NO: 716 - protein, 343 aa, synthetic construct
  REGION 1..343: note = variant of RNA ligase 2 from Escherichia phage RB69 (Bacteriophage RB69)
MHHHHHHGGSGMFKKYSSLENHYNSKFIEKLYANGLTDGVWVAREKIHGTNFSLIIERDNVTCAKRTGPIKPTETFYGYEIVLKKYDKAIKTVQKSMYTAGAVSYQVFGEFAGNGIWKGVDYGEKDFYVFDILINAESGDNTYLTDYEMQDFCNECGFKMAPMLGRGTFDSLIMIPNDFDSVLMAYNAVAKEDLVKANNSVFDANVIGDNTAEGYVLKPCEPKWLPNGTRVAIKCKNSKFSEKKKSDKPIKTQVPLTEIDKNLLDVLACYVTLNRVNNVISKIGTVTPADFEKVMWLTVQDILEETSREGIVLTTSDNPDLVKKELVRMVQDVLKSAWRELVS

SEQ ID NO: 717 - DNA, 1029 bp, synthetic construct
  misc_feature 1..1029: note = variant of RNA ligase 2 from Escherichia phage RB69 (Bacteriophage RB69)
  source 1..1029: mol_type = other DNA
atgcatcaccatcaccatcacggtggcagcggtatgtttaagaaatattctagtctggaaaaccattacaatagcaaattcattgagaaactctatgctaacggcttaactgatggtgtatgggttgcgcgcgaaaagatccacgggacgaacttttcgctgattatcgagcgtgataatgtaacatgcgccaaacgtacaggcccgattaagcctaccgaaaccttctacggttatgaaatcgtcctgaagaaatacgataaagcgattaagacggtgcagaaatctatgtataccgccggcgccgtttcctaccaagtgttcggagaatttgctggcaacggtatctggaaaggggtcgattatggcgagaaagacttctatgtgtttgatattctgatcaatgcggaatcaggagacaacacgtacctgactgattatgaaatgcaggacttctgtaatgaatgtgggtttaagatggcaccaatgcttggtcgcggcgccttcgatagcctgattatgattccgaacgatttcgattcggttctcatggcttacaatgcaacggcgaaagaggacctggtaaaagcgaacaactgcgtctttgatgccaatgtgatcggtgataacactgctgaaggctatgttcttaaaccgtgtgaacccaaatggttaccgaatgggacgcgtgtggcgatcaaatgcaagaactccaaattcagcgagaagaagaaaagtgacaaaccgatcaagacacaagtcccactgacggaaattgataagaatctgctggacgtattggcctgttatattactttaaaccgcgtgaacaacgtgatctctaagattggaacagtgacgccgcatgattttgagaaagtaatgtggctgactgttcaggatattctggaagaaacgtcacgtgagggtattgttctgacgacatcggacaatcctgacctcgtcaagaaagaacttgtccgcatggtgcaggatgtgttaaaatcggcatggcgcgaactggtgtcg

SEQ ID NO: 718 - protein, 343 aa, synthetic construct
  REGION 1..343: note = variant of RNA ligase 2 from Escherichia phage RB69 (Bacteriophage RB69)
MHHHHHHGGSGMFKKYSSLENHYNSKFIEKLYANGLTDGVWVAREKIHGTNFSLIIERDNVTCAKRTGPIKPTETFYGYEIVLKKYDKAIKTVQKSMYTAGAVSYQVFGEFAGNGIWKGVDYGEKDFYVFDILINAESGDNTYLTDYEMQDFCNECGFKMAPMLGRGAFDSLIMIPNDFDSVLMAYNATAKEDLVKANNCVFDANVIGDNTAEGYVLKPCEPKWLPNGTRVAIKCKNSKFSEKKKSDKPIKTQVPLTEIDKNLLDVLACYITLNRVNNVISKIGTVTPHDFEKVMWLTVQDILEETSREGIVLTTSDNPDLVKKELVRMVQDVLKSAWRELVS

SEQ ID NO: 719 - DNA, 1029 bp, synthetic construct
  misc_feature 1..1029: note = variant of RNA ligase 2 from Escherichia phage RB69 (Bacteriophage RB69)
  source 1..1029: mol_type = other DNA
atgcatcaccatcaccatcacggtggcagcggtatgtttaagaaatattctagtctggaaaaccattacaatagcaaattcattgagaaactctatgctaacggcttaactgatggtgtatgggttgcgcgcgaaaagatccacgggacgaacttttcgctgattatcgagcgtgataatgtaacatgcgccaaacgtacaggcccgattaagcctaccgaaaccttctacggttatgaaatcgtcctgaagaaatacgataaagcgattaagacggtgcaggtgtctatgtataccgccggcgccgtttcctaccaagtgttcggagaatttgctggcaacggtatctggaaaggggtcgattatggcgagaaagacttctatgtgtttgatattctgatcaatgcggaatcaggagacaacacgtacctgactgattatgaaatgcaggacttctgtaatgaatgtgggtttaagatggcaccaatgcttggtcgcggcacattcgatagcctgattatgattccgaacgatttcgattcggttctcatggcttacaatgcaacggcgaaagaggacctggtaaaagcgaacaacaccgtctttgatgccaatgtgatcggtgataacactgctgaaggctatgttcttaaaccgtgtgaacccaaatggttaccgaatgggacgcgtgtggcgatcaaatgcaagaactccaaattcagcgagaagaagaaaagtgacaaaccgatcaagacacaagtcccactgacggaaattgataagaatctgctggacgtattggcctgttatgttactttaaaccgcgtgaacaacgtgatctctaagattggaacagtgacgccgcatgattttgagaaagtaatgtggctgactgttcaggatattctggaagaaacgtcacgtgagggtattgttctgacgacatcggacaatcctgacctcgtcaagaaagaacttgtccgcatggtgcaggatgagttaaaatcggcctggcgcgaactggtgtcg

SEQ ID NO: 720 - protein, 343 aa, synthetic construct
  REGION 1..343: note = variant of RNA ligase 2 from Escherichia phage RB69 (Bacteriophage RB69)
MHHHHHHGGSGMFKKYSSLENHYNSKFIEKLYANGLTDGVWVAREKIHGTNFSLIIERDNVTCAKRTGPIKPTETFYGYEIVLKKYDKAIKTVQVSMYTAGAVSYQVFGEFAGNGIWKGVDYGEKDFYVFDILINAESGDNTYLTDYEMQDFCNECGFKMAPMLGRGTFDSLIMIPNDFDSVLMAYNATAKEDLVKANNTVFDANVIGDNTAEGYVLKPCEPKWLPNGTRVAIKCKNSKFSEKKKSDKPIKTQVPLTEIDKNLLDVLACYVTLNRVNNVISKIGTVTPHDFEKVMWLTVQDILEETSREGIVLTTSDNPDLVKKELVRMVQDELKSAWRELVS

SEQ ID NO: 721 - DNA, 1029 bp, synthetic construct
  misc_feature 1..1029: note = variant of RNA ligase 2 from Escherichia phage RB69 (Bacteriophage RB69)
  source 1..1029: mol_type = other DNA
atgcatcaccatcaccatcacggtggcagcggtatgtttaagaaatattctagtctggaaaaccattacaatagcaaattcattgagaaactctatgctaacggcttaactgatggtgtatgggttgcgcgcgaaaagatccacgggacgaacttttcgctgattatcgagcgtgataatgtaacatgcgccaaacgtacaggcccgattaagcctaccgaaaccttctacggttatgaaatcgtcctgaagaaatacgataaagcgattaagacggtgcagaaatctatgtataccgccggcgccgtttcctaccaagtgttcggagaatttgctggcaacggtatctggaaaggggtcgattatggcgagaaagacttctatgtgtttgatattctgatcaatgcggaatcaggagacaacacgtacctgactgattatgaaatgcaggacttctgtaatgaatgtgggtttaagatggcaccaatgcttggtcgcggcacattcgatagcctgattatgattccgaacgatttcgattcggttctcatggcttacaatgcagtggcgaaagaggacctggtaaaagcgaacaacagcgtctttgatgccaatgtgatcggtgataacactgctgaaggctatgttcttaaaccgtgtgaacccaaatggttaccgaatgggacgcgtgtggcgatcaaatgcaagaactccaaattcagcgagaagaagaaaagtgacaaaccgatcaagacacaagtcccactgacggaaattgataagaatctgctggacgtattggcctgttatattactttaaaccgcgtgaacaacgtgatctctaagattggaacagtgacgccggccgattttgagaaagtaatgtggctgactgttcaagatattctggaagaaacgtcacgtgagggtattgttctgacgacatcggacaatcctgacctcgtcaagaaagaacttgtccgcatggtgcaggatgagttaaaatcggcctggcgcgaactggtgtcg

SEQ ID NO: 722 - protein, 343 aa, synthetic construct
  REGION 1..343: note = variant of RNA ligase 2 from Escherichia phage RB69 (Bacteriophage RB69)
MHHHHHHGGSGMFKKYSSLENHYNSKFIEKLYANGLTDGVWVAREKIHGTNFSLIIERDNVTCAKRTGPIKPTETFYGYEIVLKKYDKAIKTVQKSMYTAGAVSYQVFGEFAGNGIWKGVDYGEKDFYVFDILINAESGDNTYLTDYEMQDFCNECGFKMAPMLGRGTFDSLIMIPNDFDSVLMAYNAVAKEDLVKANNSVFDANVIGDNTAEGYVLKPCEPKWLPNGTRVAIKCKNSKFSEKKKSDKPIKTQVPLTEIDKNLLDVLACYITLNRVNNVISKIGTVTPADFEKVMWLTVQDILEETSREGIVLTTSDNPDLVKKELVRMVQDELKSAWRELVS

SEQ ID NO: 723 - DNA, 1029 bp, synthetic construct
  misc_feature 1..1029: note = variant of RNA ligase 2 from Escherichia phage RB69 (Bacteriophage RB69)
  source 1..1029: mol_type = other DNA
atgcatcaccatcaccatcacggtggcagcggtatgtttaagaaatattctagtctggaaaaccattacaatagcaaattcattgagaaactctatgctaacggcttaactgatggtgtatgggttgcgcgcgaaaagatccacgggacgaacttttcgctgattatcgagcgtgataatgtaacatgcgccaaacgtacaggcccgattaagcctaccgaaaccttctacggttatgaaatcgtcctgaagaaatacgataaagcgattaagacggtgcaggtgtctatgtataccgccggcgccgtttcctaccaagtgttcggagaatttgctggcaacggtatctggaaaggggtcgattatggcgagaaagacttctatgtgtttgatattctgatcaatgcggaatcaggagacaacacgtacctgactgattatgaaatgcaggacttctgtaatgaatgtgggtttaagatggcaccaatgcttggtcgcggcgccttcgatagcctgattatgattccgaacgatttcgattcggttctcatggcttacaatgcagtggcgaaagaggacctggtaaaagcgaacaactgcgtctttgatgccaatgtgatcggtgataacactgctgaaggctatgttcttaaaccgtgtgaacccaaatggttaccgaatgggacgcgtgtggcgatcaaatgcaagaactccaaattcagcgagaagaagaaaagtgacaaaccgatcaagacacaagtcccactgacggaaattgataagaatctgctggacgtattggcctgttatgttactttaaaccgcgtgaacaacgtgatctctaagattggaacagtgacgccgcatgattttgagaaagtaatgtggctgactgttcaagatattctggaagaaacgtcacgtgagggtattgttctgacgacatcggacaatcctgacctcgtcaagaaagaacttgtccgcatggtgcaggatgagttaaaatcgggctggcgcgaactggtgtcg

SEQ ID NO: 724 - protein, 343 aa, synthetic construct
  REGION 1..343: note = variant of RNA ligase 2 from Escherichia phage RB69 (Bacteriophage RB69)
MHHHHHHGGSGMFKKYSSLENHYNSKFIEKLYANGLTDGVWVAREKIHGTNFSLIIERDNVTCAKRTGPIKPTETFYGYEIVLKKYDKAIKTVQVSMYTAGAVSYQVFGEFAGNGIWKGVDYGEKDFYVFDILINAESGDNTYLTDYEMQDFCNECGFKMAPMLGRGAFDSLIMIPNDFDSVLMAYNAVAKEDLVKANNCVFDANVIGDNTAEGYVLKPCEPKWLPNGTRVAIKCKNSKFSEKKKSDKPIKTQVPLTEIDKNLLDVLACYVTLNRVNNVISKIGTVTPHDFEKVMWLTVQDILEETSREGIVLTTSDNPDLVKKELVRMVQDELKSGWRELVS

SEQ ID NO: 725 - DNA, 1029 bp, synthetic construct
  misc_feature 1..1029: note = variant of RNA ligase 2 from Escherichia phage RB69 (Bacteriophage RB69)
  source 1..1029: mol_type = other DNA
atgcatcaccatcaccatcacggtggcagcggtatgtttaagaaatattctagtctggaaaaccattacaatagcaaattcattgagaaactctatgctaacggcttaactgatggtgtatgggttgcgcgcgaaaagatccacgggacgaacttttcgctgattatcgagcgtgataatgtaacatgcgccaaacgtacaggcccgattaagcctaccgaaaccttctacggttatgaaatcgtcctgaagaaatacgataaagcgattaagacggtgcagaaatctatgtataccgccggcgccgtttcctaccaagtgttcggagaatttgctggcaacggtatctggaaaggggtcgattatggcgagaaagacttctatgtgtttgatattctgatcaatgcggaatcaggagacaacacgtacctgactgattatgaaatgcaggacttctgtaatgaatgtgggtttaagatggcaccaatgcttggtcgcggcaccttcgatagcctgattatgattccgaacgatttcgattcggttctcatggcttacaatgcagtggcgaaagaggacctggtaaaagcgaacaactgcgtctttgatgccaatgtgatcggtgataacactgctgaaggctatgttcttaaaccgtgtgaacccaaatggttaccgaatgggacgcgtgtggcgatcaaatgcaagaactccaaattcagcgagaagaagaaaagtgacaaaccgatcaagacacaagtcccactgacggaaattgataagaatctgctggacgtattggcctgttatgttactttaaaccgcgtgaacaacgtgatctctaagattggaacagtgacgccgcatgattttgagaaagtaatgtggctgactgttcaggatattctggaagaaacgtcacgtgagggtattgttctgacgacatcggacaatcctgacctcgtcaagaaagaacttgtccgcatggtgcaggatgtgttaaaatcggcatggcgcgaactggtgtcg

SEQ ID NO: 726 - protein, 343 aa, synthetic construct
  REGION 1..343: note = variant of RNA ligase 2 from Escherichia phage RB69 (Bacteriophage RB69)
MHHHHHHGGSGMFKKYSSLENHYNSKFIEKLYANGLTDGVWVAREKIHGTNFSLIIERDNVTCAKRTGPIKPTETFYGYEIVLKKYDKAIKTVQKSMYTAGAVSYQVFGEFAGNGIWKGVDYGEKDFYVFDILINAESGDNTYLTDYEMQDFCNECGFKMAPMLGRGTFDSLIMIPNDFDSVLMAYNAVAKEDLVKANNCVFDANVIGDNTAEGYVLKPCEPKWLPNGTRVAIKCKNSKFSEKKKSDKPIKTQVPLTEIDKNLLDVLACYVTLNRVNNVISKIGTVTPHDFEKVMWLTVQDILEETSREGIVLTTSDNPDLVKKELVRMVQDVLKSAWRELVS

SEQ ID NO: 727 - DNA, 1029 bp, synthetic construct
  misc_feature 1..1029: note = variant of RNA ligase 2 from Escherichia phage RB69 (Bacteriophage RB69)
  source 1..1029: mol_type = other DNA
atgcatcaccatcaccatcacggtggcagcggtatgtttaagaaatattctagtctggaaaaccattacaatagcaaattcattgagaaactctatgctaacggcttaactgatggtgtatgggttgcgcgcgaaaagatccacgggacgaacttttcgctgattatcgagcgtgataatgtaacatgcgccaaacgtacaggcccgattaagcctaccgaaaccttctacggttatgaaatcgtcctgaagaaatacgataaagcgattaagacggtgcagaaatctatgtataccgccggcgccgtttcctaccaagtgttcggagaatttgctggcaacggtatctggaaaggggtcgattatggcgagaaagacttctatgtgtttgatattctgatcaatgcggaatcaggagacaacacgtacctgactgattatgaaatgcaggacttctgtaatgaatgtgggtttaagatggcaccaatgcttggtcgcggcaccttcgatagcctgattatgattccgaacgatttcgattcggttctcatggcttacaatgcagtggcgaaagaggacctggtaaaagcgaacaactgcgtctttgatgccaatgtgatcggtgataacactgctgaaggctatgttcttaaaccgtgtgaacccaaatggttaccgaatgggacgcgtgtggcgatcaaatgcaagaactccaaattcagcgagaagaagaaaagtgacaaaccgatcaagacacaagtcccactgacggaaattgataagaatctgctggacgtattggcctgttatgttactttaaaccgcgtgaacaacgtgatctctaagattggaacagtgacgccgcatgattttgagaaagtaatgtggctgactgttcaggatattctggaagaaacgtcacgtgagggtattgttctgacgacatcggacaatcctgacctcgtcaagaaagaacttgtccgcatggtgcaggatgagttaaaatcgggctggcgcgaactggtgtcg

SEQ ID NO: 728 - protein, 343 aa, synthetic construct
  REGION 1..343: note = variant of RNA ligase 2 from Escherichia phage RB69 (Bacteriophage RB69)
MHHHHHHGGSGMFKKYSSLENHYNSKFIEKLYANGLTDGVWVAREKIHGTNFSLIIERDNVTCAKRTGPIKPTETFYGYEIVLKKYDKAIKTVQKSMYTAGAVSYQVFGEFAGNGIWKGVDYGEKDFYVFDILINAESGDNTYLTDYEMQDFCNECGFKMAPMLGRGTFDSLIMIPNDFDSVLMAYNAVAKEDLVKANNCVFDANVIGDNTAEGYVLKPCEPKWLPNGTRVAIKCKNSKFSEKKKSDKPIKTQVPLTEIDKNLLDVLACYVTLNRVNNVISKIGTVTPHDFEKVMWLTVQDILEETSREGIVLTTSDNPDLVKKELVRMVQDELKSGWRELVS

SEQ ID NO: 729 - DNA, 1029 bp, synthetic construct
  misc_feature 1..1029: note = variant of RNA ligase 2 from Escherichia phage RB69 (Bacteriophage RB69)
  source 1..1029: mol_type = other DNA
atgcatcaccatcaccatcacggtggcagcggtatgtttaagaaatattctagtctggaaaaccattacaatagcaaattcattgagaaactctatgctaacggcttaactgatggtgtatgggttgcgcgcgaaaagatccacgggacgaacttttcgctgattatcgagcgtgataatgtaacatgcgccaaacgtacaggcccgattaagcctaccgaaaccttctacggttatgaaatcgtcctgaagaaatacgataaagcgattaagacggtgcagaaatctatgtataccgccggcgccgtttcctaccaagtgttcggagaatttgctggcaacggtatctggaaaggggtcgattatggcgagaaagacttctatgtgtttgatattctgatcaatgcggaatcaggagacaacacgtacctgactgattatgaaatgcaggacttctgtaatgaatttgggtttaagatggcaccaatgcttggtcgcggcaccttcgatagcctgattatgattccgaacgatttcgattcggttctcatggcttacaatgcagtggcgaaagaggacctggtaaaagcgaacaactgcgtctttgatgccaatgtgatcggtgataacactgctgaaggctatgttcttaaaccgtgtgaacccaaatggttaccgaatgggacgcgtgtggcgatcaaatgcaagaactccaaattcagcgagaagaagaaaagtgacaaaccgatcaagacacaagtcccactgacggaaattgataagaatctgctggacgtattggcctgttatattactttaaaccgcgtgaacaacgtgatctctaagattggaacagtgacgccggccgattttgagaaagtaatgtggctgactgttcaagatattctggaagaaacgtcacgtgagggtattgttctgacgacatcggacaatcctgacctcgtcaagaaagaacttgtccgcatggtgcaggatgagttaaaatcggcctggcgcgaactggtgtcg

SEQ ID NO: 730 - protein, 343 aa, synthetic construct
  REGION 1..343: note = variant of RNA ligase 2 from Escherichia phage RB69 (Bacteriophage RB69)
MHHHHHHGGSGMFKKYSSLENHYNSKFIEKLYANGLTDGVWVAREKIHGTNFSLIIERDNVTCAKRTGPIKPTETFYGYEIVLKKYDKAIKTVQKSMYTAGAVSYQVFGEFAGNGIWKGVDYGEKDFYVFDILINAESGDNTYLTDYEMQDFCNEFGFKMAPMLGRGTFDSLIMIPNDFDSVLMAYNAVAKEDLVKANNCVFDANVIGDNTAEGYVLKPCEPKWLPNGTRVAIKCKNSKFSEKKKSDKPIKTQVPLTEIDKNLLDVLACYITLNRVNNVISKIGTVTPADFEKVMWLTVQDILEETSREGIVLTTSDNPDLVKKELVRMVQDELKSAWRELVS

SEQ ID NO: 731 - DNA, 1029 bp, synthetic construct
  misc_feature 1..1029: note = variant of RNA ligase 2 from Escherichia phage RB69 (Bacteriophage RB69)
  source 1..1029: mol_type = other DNA
atgcatcaccatcaccatcacggtggcagcggtatgtttaagaaatattctagtctggaaaaccattacaatagcaaattcattgagaaactctatgctaacggcttaactgatggtgtatgggttgcgcgcgaaaagatccacgggacgaacttttcgctgattatcgagcgtgataatgtaacatgcgccaaacgtacaggcccgattaagcctaccgaaaccttctacggttatgaaatcgtcctgaagaaatacgataaagcgattaagacggtgcagaaatctatgtataccgccggcgccgtttcctaccaagtgttcggagaatttgctggcaacggtatctggaaaggggtcgattatggcgagaaagacttctatgtgtttgatattctgatcaatgcggaatcaggagacaacacgtacctgactgattatgaaatgcaggacttctgtaatgaatgtgggtttaagatggcaccaatgcttggtcgcggcacattcgatagcctgattatgattccgaacgatttcgattcggttctcatggcttacaatgcaacggcgaaagaggacctggtaaaagcgaacaactgcgtctttgatgccaatgtgatcggtgataacactgctgaaggctatgttcttaaaccgtgtgaacccaaatggttaccgaatgggacgcgtgtggcgatcaaatgcaagaactccaaattcagcgagaagaagaaaagtgacaaaccgatcaagacacaagtcccactgacggaaattgataagaatctgctggacgtattggcctgttatgttactttaaaccgcgtgaacaacgtgatctctaagattggaacagtgacgccggccgattttgagaaagtaatgtggctgactgttcaggatattctggaagaaacgtcacgtgagggtattgttctgacgacatcggacaatcctgacctcgtcaagaaagaacttgtccgcatggtgcaggatgtgttaaaatcggcatggcgcgaactggtgtcg

SEQ ID NO: 732 - protein, 343 aa, synthetic construct; identical to SEQ ID NO: 576
  REGION 1..343: note = variant of RNA ligase 2 from Escherichia phage RB69 (Bacteriophage RB69)

SEQ ID NO: 733 - DNA, 1029 bp, synthetic construct
  misc_feature 1..1029: note = variant of RNA ligase 2 from Escherichia phage RB69 (Bacteriophage RB69)
  source 1..1029: mol_type = other DNA
atgcatcaccatcaccatcacggtggcagcggtatgtttaagaaatattctagtctggaaaaccattacaatagcaaattcattgagaaactctatgctaacggcttaactgatggtgtatgggttgcgcgcgaaaagatccacgggacgaacttttcgctgattatcgagcgtgataatgtaacatgcgccaaacgtacaggcccgattaagcctaccgaaaccttctacggttatgaaatcgtcctgaagaaatacgataaagcgattaagacggtgcaggtgtctatgtataccgccggcgccgtttcctaccaagtgttcggagaatttgctggcaacggtatctggaaaggggtcgattatggcgagaaagacttctatgtgtttgatattctgatcaatgcggaatcaggagacaacacgtacctgactgattatgaaatgcaggacttctgtaatgaatttgggtttaagatggcaccaatgcttggtcgcggcaccttcgatagcctgattatgattccgaacgatttcgattcggttctcatggcttacaatgcaaccgcgaaagaggacctggtaaaagcgaacaacaccgtctttgatgccaatgtgatcggtgataacactgctgaaggctatgttcttaaaccgtgtgaacccaaatggttaccgaatgggacgcgtgtggcgatcaaatgcaagaactccaaattcagcgagaagaagaaaagtgacaaaccgatcaagacacaagtcccactgacggaaattgataagaatctgctggacgtattggcctgttatattactttaaaccgcgtgaacaacgtgatctctaagattggaacagtgacgccgaaagattttgagaaagtaatgtggctgactgttcaagatattctggaagaaacgtcacgtgagggtattgttctgacgacatcggacaatcctgacctcgtcaagaaagaacttgtccgcatggtgcaggatgtgttaaaatcggcctggcgcgaactggtgtcg

SEQ ID NO: 734 - protein, 343 aa, synthetic construct
  REGION 1..343: note = variant of RNA ligase 2 from Escherichia phage RB69 (Bacteriophage RB69)
MHHHHHHGGSGMFKKYSSLENHYNSKFIEKLYANGLTDGVWVAREKIHGTNFSLIIERDNVTCAKRTGPIKPTETFYGYEIVLKKYDKAIKTVQVSMYTAGAVSYQVFGEFAGNGIWKGVDYGEKDFYVFDILINAESGDNTYLTDYEMQDFCNEFGFKMAPMLGRGTFDSLIMIPNDFDSVLMAYNATAKEDLVKANNTVFDANVIGDNTAEGYVLKPCEPKWLPNGTRVAIKCKNSKFSEKKKSDKPIKTQVPLTEIDKNLLDVLACYITLNRVNNVISKIGTVTPKDFEKVMWLTVQDILEETSREGIVLTTSDNPDLVKKELVRMVQDVLKSAWRELVS

SEQ ID NO: 735 - DNA, 1029 bp, synthetic construct
  misc_feature 1..1029: note = variant of RNA ligase 2 from Escherichia phage RB69 (Bacteriophage RB69)
  source 1..1029: mol_type = other DNA
atgcatcaccatcaccatcacggtggcagcggtatgtttaagaaatattctagtctggaaaaccattacaatagcaaattcattgagaaactctatgctaacggcttaactgatggtgtatgggttgcgcgcgaaaagatccacgggacgaacttttcgctgattatcgagcgtgataatgtaacatgcgccaaacgtacaggcccgattaagcctaccgaaaccttctacggttatgaaatcgtcctgaagaaatacgataaagcgattaagacggtgcagaaatctatgtataccgccggcgccgtttcctaccaagtgttcggagaatttgctggcaacggtatctggaaaggggtcgattatggcgagaaagacttctatgtgtttgatattctgatcaatgcggaatcaggagacaacacgtacctgactgattatgaaatgcaggacttctgtaatgaatgtgggtttaagatggcaccaatgcttggtcgcggcaccttcgatagcctgattatgattccgaacgatttcgattcggttctcatggcttacaatgcaaccgcgaaagaggacctggtaaaagcgaacaactgcgtctttgatgccaatgtgatcggtgataacactgctgaaggctatgttcttaaaccgtgtgaacccaaatggttaccgaatgggacgcgtgtggcgatcaaatgcaagaactccaaattcagcgagaagaagaaaagtgacaaaccgatcaagacacaagtcccactgacggaaattgataagaatctgctggacgtattggcctgttatgttactttaaaccgcgtgaacaacgtgatctctaagattggaacagtgacgccggccgattttgagaaagtaatgtggctgactgttgaagatattctggaagaaacgtcacgtgagggtattgttctgacgacatcggacaatcctgacctcgtcaagaaagaacttgtccgcatggtgcaggatgagttaaaatcggcatggcgcgaactggtgtcg

SEQ ID NO: 736 - protein, 343 aa, synthetic construct
  REGION 1..343: note = variant of RNA ligase 2 from Escherichia phage RB69 (Bacteriophage RB69)
MHHHHHHGGSGMFKKYSSLENHYNSKFIEKLYANGLTDGVWVAREKIHGTNFSLIIERDNVTCAKRTGPIKPTETFYGYEIVLKKYDKAIKTVQKSMYTAGAVSYQVFGEFAGNGIWKGVDYGEKDFYVFDILINAESGDNTYLTDYEMQDFCNECGFKMAPMLGRGTFDSLIMIPNDFDSVLMAYNATAKEDLVKANNCVFDANVIGDNTAEGYVLKPCEPKWLPNGTRVAIKCKNSKFSEKKKSDKPIKTQVPLTEIDKNLLDVLACYVTLNRVNNVISKIGTVTPADFEKVMWLTVEDILEETSREGIVLTTSDNPDLVKKELVRMVQDELKSAWRELVS

SEQ ID NO: 737 - DNA, 1029 bp, synthetic construct
  misc_feature 1..1029: note = variant of RNA ligase 2 from Escherichia phage RB69 (Bacteriophage RB69)
  source 1..1029: mol_type = other DNA
atgcatcaccatcaccatcacggtggcagcggtatgtttaagaaatattctagtctggaaaaccattacaatagcaaattcattgagaaactctatgctaacggcttaactgatggtgtatgggttgcgcgcgaaaagatccacgggacgaacttttcgctgattatcgagcgtgataatgtaacatgcgccaaacgtacaggcccgattaagcctaccgaaaccttctacggttatgaaatcgtcctgaagaaatacgataaagcgattaagacggtgcaggtgtctatgtataccgccggcgccgtttcctaccaagtgttcggagaatttgctggcaacggtatctggaaaggggtcgattatggcgagaaagacttctatgtgtttgatattctgatcaatgcggaatcaggagacaacacgtacctgactgattatgaaatgcaggacttctgtaatgaatgtgggtttaagatggcaccaatgcttggtcgcggcaccttcgatagcctgattatgattccgaacgatttcgattcggttctcatggcttacaatgcagtggcgaaagaggacctggtaaaagcgaacaactgcgtctttgatgccaatgtgatcggtgataacactgctgaaggctatgttcttaaaccgtgtgaacccaaatggttaccgaatgggacgcgtgtggcgatcaaatgcaagaactccaaattcagcgagaagaagaaaagtgacaaaccgatcaagacacaagtcccactgacggaaattgataagaatctgctggacgtattggcctgttatgtcactttaaaccgcgtgaacaacgtgatctctaagattggaacagtgacgccggccgattttgagaaagtaatgtggctgactgttcaggatattctggaagaaacgtcacgtgagggtattgttctgacgacatcggacaatcctgacctcgtcaagaaagaacttgtccgcatggtgcaggatgtgttaaaatcgggctggcgcgaactggtgtcg

SEQ ID NO: 738 - protein, 343 aa, synthetic construct
  REGION 1..343: note = variant of RNA ligase 2 from Escherichia phage RB69 (Bacteriophage RB69)
MHHHHHHGGSGMFKKYSSLENHYNSKFIEKLYANGLTDGVWVAREKIHGTNFSLIIERDNVTCAKRTGPIKPTETFYGYEIVLKKYDKAIKTVQVSMYTAGAVSYQVFGEFAGNGIWKGVDYGEKDFYVFDILINAESGDNTYLTDYEMQDFCNECGFKMAPMLGRGTFDSLIMIPNDFDSVLMAYNAVAKEDLVKANNCVFDANVIGDNTAEGYVLKPCEPKWLPNGTRVAIKCKNSKFSEKKKSDKPIKTQVPLTEIDKNLLDVLACYVTLNRVNNVISKIGTVTPADFEKVMWLTVQDILEETSREGIVLTTSDNPDLVKKELVRMVQDVLKSGWRELVS

SEQ ID NO: 739 - DNA, 1029 bp, synthetic construct
  misc_feature 1..1029: note = variant of RNA ligase 2 from Escherichia phage RB69 (Bacteriophage RB69)
  source 1..1029: mol_type = other DNA
atgcatcaccatcaccatcacggtggcagcggtatgtttaagaaatattctagtctggaaaaccattacaatagcaaattcattgagaaactctatgctaacggcttaactgatggtgtatgggttgcgcgcgaaaagatccacgggacgaacttttcgctgattatcgagcgtgataatgtaacatgcgccaaacgtacaggcccgattaagcctaccgaaaccttctacggttatgaaatcgtcctgaagaaatacgataaagcgattaagacggtgcaggtgtctatgtataccgccggcgccgtttcctaccaagtgttcggagaatttgctggcaacggtatctggaaaggggtcgattatggcgagaaagacttctatgtgtttgatattctgatcaatgcggaatcaggagacaacacgtacctgactgattatgaaatgcaggacttctgtaatgaatttgggtttaagatggcaccaatgcttggtcgcggcgccttcgatagcctgattatgattccgaacgatttcgattcggttctcatggcttacaatgcagtggcgaaagaggacctggtaaaagcgaacaactgcgtctttgatgccaatgtgatcggtgataacactgctgaaggctatgttcttaaaccgtgtgaacccaaatggttaccgaatgggacgcgtgtggcgatcaaatgcaagaactccaaattcagcgagaagaagaaaagtgacaaaccgatcaagacacaagtcccactgacggaaattgataagaatctgctggacgtattggcctgttatgtcactttaaaccgcgtgaacaacgtgatctctaagattggaacagtgacgccggccgattttgagaaagtaatgtggctgactgttcaggatattctggaagaaacgtcacgtgagggtattgttctgacgacatcggacaatcctgacctcgtcaagaaagaacttgtccgcatggtgcaggatgtgttaaaatcggcatggcgcgaactggtgtcg

SEQ ID NO: 740 - protein, 343 aa, synthetic construct
  REGION 1..343: note = variant of RNA ligase 2 from Escherichia phage RB69 (Bacteriophage RB69)
MHHHHHHGGSGMFKKYSSLENHYNSKFIEKLYANGLTDGVWVAREKIHGTNFSLIIERDNVTCAKRTGPIKPTETFYGYEIVLKKYDKAIKTVQVSMYTAGAVSYQVFGEFAGNGIWKGVDYGEKDFYVFDILINAESGDNTYLTDYEMQDFCNEFGFKMAPMLGRGAFDSLIMIPNDFDSVLMAYNAVAKEDLVKANNCVFDANVIGDNTAEGYVLKPCEPKWLPNGTRVAIKCKNSKFSEKKKSDKPIKTQVPLTEIDKNLLDVLACYVTLNRVNNVISKIGTVTPADFEKVMWLTVQDILEETSREGIVLTTSDNPDLVKKELVRMVQDVLKSAWRELVS

SEQ ID NO: 741 - DNA, 1029 bp, synthetic construct
  misc_feature 1..1029: note = variant of RNA ligase 2 from Escherichia phage RB69 (Bacteriophage RB69)
  source 1..1029: mol_type = other DNA
atgcatcaccatcaccatcacggtggcagcggtatgtttaagaaatattctagtctggaaaaccattacaatagcaaattcattgagaaactctatgctaacggcttaactgatggtgtatgggttgcgcgcgaaaagatccacgggacgaacttttcgctgattatcgagcgtgataatgtaacatgcgccaaacgtacaggcccgattaagcctaccgaaaccttctacggttatgaaatcgtcctgaagaaatacgataaagcgattaagacggtgcagaaatctatgtataccgccggcgccgtttcctaccaagtgttcggagaatttgctggcaacggtatctggaaaggggtcgattatggcgagaaagacttctatgtgtttgatattctgatcaatgcggaatcaggagacaacacgtacctgactgattatgaaatgcaggacttctgtaatgaatgtgggtttaagatggcaccaatgcttggtcgcggcaccttcgatagcctgattatgattccgaacgatttcgattcggttctcatggcttacaatgcaaccgcgaaagaggacctggtaaaagcgaacaactgcgtctttgatgccaatgtgatcggtgataacactgctgaaggctatgttcttaaaccgtgtgaacccaaatggttaccgaatgggacgcgtgtggcgatcaaatgcaagaactccaaattcagcgagaagaagaaaagtgacaaaccgatcaagacacaagtcccactgacggaaattgataagaatctgctggacgtattggcctgttatattactttaaaccgcgtgaacaacgtgatctctaagattggaacagtgacgccgaccgattttgagaaagtaatgtggctgactgttcaggatattctggaagaaacgtcacgtgagggtattgttctgacgacatcggacaatcctgacctcgtcaagaaagaacttgtccgcatggtgcaggatgtgttaaaatcggcatggcgcgaactggtgtcg

SEQ ID NO: 742 - protein, 343 aa, synthetic construct
  REGION 1..343: note = variant of RNA ligase 2 from Escherichia phage RB69 (Bacteriophage RB69)
MHHHHHHGGSGMFKKYSSLENHYNSKFIEKLYANGLTDGVWVAREKIHGTNFSLIIERDNVTCAKRTGPIKPTETFYGYEIVLKKYDKAIKTVQKSMYTAGAVSYQVFGEFAGNGIWKGVDYGEKDFYVFDILINAESGDNTYLTDYEMQDFCNECGFKMAPMLGRGTFDSLIMIPNDFDSVLMAYNATAKEDLVKANNCVFDANVIGDNTAEGYVLKPCEPKWLPNGTRVAIKCKNSKFSEKKKSDKPIKTQVPLTEIDKNLLDVLACYITLNRVNNVISKIGTVTPTDFEKVMWLTVQDILEETSREGIVLTTSDNPDLVKKELVRMVQDVLKSAWRELVS

SEQ ID NO: 743 - DNA, 1029 bp, synthetic construct
  misc_feature 1..1029: note = variant of RNA ligase 2 from Escherichia phage RB69 (Bacteriophage RB69)
  source 1..1029: mol_type = other DNA
atgcatcaccatcaccatcacggtggcagcggtatgtttaagaaatattctagtctggaaaaccattacaatagcaaattcattgagaaactctatgctaacggcttaactgatggtgtatgggttgcgcgcgaaaagatccacgggacgaacttttcgctgattatcgagcgtgataatgtaacatgcgccaaacgtacaggcccgattaagcctaccgaaaccttctacggttatgaaatcgtcctgaagaaatacgataaagcgattaagacggtgcagaaatctatgtataccgccggcgccgtttcctaccaagtgttcggagaatttgctggcaacggtatctggaaaggggtcgattatggcgagaaagacttctatgtgtttgatattctgatcaatgcggaatcaggagacaacacgtacctgactgattatgaaatgcaggacttctgtaatgaatgtgggtttaagatggcaccaatgcttggtcgcggcaccttcgatagcctgattatgattccgaacgatttcgattcggttctcatggcttacaatgcaacggcgaaagaggacctggtaaaagcgaacaactgcgtctttgatgccaatgtgatcggtgataacactgctgaaggctatgttcttaaaccgtgtgaacccaaatggttaccgaatgggacgcgtgtggcgatcaaatgcaagaactccaaattcagcgagaagaagaaaagtgacaaaccgatcaagacacaagtcccactgacggaaattgataagaatctgctggacgtattggcctgttatgtcactttaaaccgcgtgaacaacgtgatctctaagattggaacagtgacgccgcatgattttgagaaagtaatgtggctgactgttcaggatattctggaagaaacgtcacgtgagggtattgttctgacgacatcggacaatcctgacctcgtcaagaaagaacttgtccgcatggtgcaggatgagttaaaatcggcctggcgcgaactggtgtcg

SEQ ID NO: 744 - protein, 343 aa, synthetic construct
  REGION 1..343: note = variant of RNA ligase 2 from Escherichia phage RB69 (Bacteriophage RB69)
MHHHHHHGGSGMFKKYSSLENHYNSKFIEKLYANGLTDGVWVAREKIHGTNFSLIIERDNVTCAKRTGPIKPTETFYGYEIVLKKYDKAIKTVQKSMYTAGAVSYQVFGEFAGNGIWKGVDYGEKDFYVFDILINAESGDNTYLTDYEMQDFCNECGFKMAPMLGRGTFDSLIMIPNDFDSVLMAYNATAKEDLVKANNCVFDANVIGDNTAEGYVLKPCEPKWLPNGTRVAIKCKNSKFSEKKKSDKPIKTQVPLTEIDKNLLDVLACYVTLNRVNNVISKIGTVTPHDFEKVMWLTVQDILEETSREGIVLTTSDNPDLVKKELVRMVQDELKSAWRELVS

SEQ ID NO: 745 - DNA, 1029 bp, synthetic construct
  misc_feature 1..1029: note = variant of RNA ligase 2 from Escherichia phage RB69 (Bacteriophage RB69)
  source 1..1029: mol_type = other DNA
atgcatcaccatcaccatcacggtggcagcggtatgtttaagaaatattctagtctggaaaaccattacaatagcaaattcattgagaaactctatgctaacggcttaactgatggtgtatgggttgcgcgcgaaaagatccacgggacgaacttttcgctgattatcgagcgtgataatgtaacatgcgccaaacgtacaggcccgattaagcctaccgaaaccttctacggttatgaaatcgtcctgaagaaatacgataaagcgattaagacggtgcagaaatctatgtataccgccggcgccgtttcctaccaagtgttcggagaatttgctggcaacggtatctggaaaggggtcgattatggcgagaaagacttctatgtgtttgatattctgatcaatgcggaatcaggagacaacacgtacctgactgattatgaaatgcaggacttctgtaatgaatgtgggtttaagatggcaccaatgcttggtcgcggcgccttcgatagcctgattatgattccgaacgatttcgattcggttctcatggcttacaatgcaacggcgaaagaggacctggtaaaagcgaacaactgcgtctttgatgccaatgtgatcggtgataacactgctgaaggctatgttcttaaaccgtgtgaacccaaatggttaccgaatgggacgcgtgtggcgatcaaatgcaagaactccaaattcagcgagaagaagaaaagtgacaaaccgatcaagacacaagtcccactgacggaaattgataagaatctgctggacgtattggcctgttatgtcactttaaaccgcgtgaacaacgtgatctctaagattggaacagtgacgccgcatgattttgagaaagtaatgtggctgactgttcaggatattctggaagaaacgtcacgtgagggtattgttctgacgacatcggacaatcctgacctcgtcaagaaagaacttgtccgcatggtgcaggatgtgttaaaatcgggctggcgcgaactggtgtcg

SEQ ID NO: 746 - protein, 343 aa, synthetic construct
  REGION 1..343: note = variant of RNA ligase 2 from Escherichia phage RB69 (Bacteriophage RB69)
MHHHHHHGGSGMFKKYSSLENHYNSKFIEKLYANGLTDGVWVAREKIHGTNFSLIIERDNVTCAKRTGPIKPTETFYGYEIVLKKYDKAIKTVQKSMYTAGAVSYQVFGEFAGNGIWKGVDYGEKDFYVFDILINAESGDNTYLTDYEMQDFCNECGFKMAPMLGRGAFDSLIMIPNDFDSVLMAYNATAKEDLVKANNCVFDANVIGDNTAEGYVLKPCEPKWLPNGTRVAIKCKNSKFSEKKKSDKPIKTQVPLTEIDKNLLDVLACYVTLNRVNNVISKIGTVTPHDFEKVMWLTVQDILEETSREGIVLTTSDNPDLVKKELVRMVQDVLKSGWRELVS

SEQ ID NO: 747 - DNA, 1029 bp, synthetic construct
  misc_feature 1..1029: note = variant of RNA ligase 2 from Escherichia phage RB69 (Bacteriophage RB69)
  source 1..1029: mol_type = other DNA
atgcatcaccatcaccatcacggtggcagcggtatgtttaagaaatattctagtctggaaaaccattacaatagcaaattcattgagaaactctatgctaacggcttaactgatggtgtatgggttgcgcgcgaaaagatccacgggacgaacttttcgctgattatcgagcgtgataatgtaacatgcgccaaacgtacaggcccgattaagcctaccgaaaccttctacggttatgaaatcgtcctgaagaaatacgataaagcgattaagacggtgcagaaatctatgtataccgccggcgccgtttcctaccaagtgttcggagaatttgctggcaacggtatctggaaaggggtcgattatggcgagaaagacttctatgtgtttgatattctgatcaatgcggaatcaggagacaacacgtacctgactgattatgaaatgcaggacttctgtaatgaatatgggtttaagatggcaccaatgcttggtcgcggcaccttcgatagcctgattatgattccgaacgatttcgattcggttctcatggcttacaatgcaacggcgaaagaggacctggtaaaagcgaacaactgcgtctttgatgccaatgtgatcggtgataacactgctgaaggctatgttcttaaaccgtgtgaacccaaatggttaccgaatgggacgcgtgtggcgatcaaatgcaagaactccaaattcagcgagaagaagaaaagtgacaaaccgatcaagacacaagtcccactgacggaaattgataagaatctgctggacgtattggcctgttatgtcactttaaaccgcgtgaacaacgtgatctctaagattggaacagtgacgccggccgattttgagaaagtaatgtggctgactgttcaggatattctggaagaaacgtcacgtgagggtattgttctgacgacatcggacaatcctgacctcgtcaagaaagaacttgtccgcatggtgcaggatgtgttaaaatcggcctggcgcgaactggtgtcg

SEQ ID NO: 748 - protein, 343 aa, synthetic construct
  REGION 1..343: note = variant of RNA ligase 2 from Escherichia phage RB69 (Bacteriophage RB69)
MHHHHHHGGSGMFKKYSSLENHYNSKFIEKLYANGLTDGVWVAREKIHGTNFSLIIERDNVTCAKRTGPIKPTETFYGYEIVLKKYDKAIKTVQKSMYTAGAVSYQVFGEFAGNGIWKGVDYGEKDFYVFDILINAESGDNTYLTDYEMQDFCNEYGFKMAPMLGRGTFDSLIMIPNDFDSVLMAYNATAKEDLVKANNCVFDANVIGDNTAEGYVLKPCEPKWLPNGTRVAIKCKNSKFSEKKKSDKPIKTQVPLTEIDKNLLDVLACYVTLNRVNNVISKIGTVTPADFEKVMWLTVQDILEETSREGIVLTTSDNPDLVKKELVRMVQDVLKSAWRELVS

SEQ ID NO: 749 - DNA, 1029 bp, synthetic construct
  misc_feature 1..1029: note = variant of RNA ligase 2 from Escherichia phage RB69 (Bacteriophage RB69)
  source 1..1029: mol_type = other DNA
atgcatcaccatcaccatcacggtggcagcggtatgtttaagaaatattctagtctggaaaaccattacaatagcaaattcattgagaaactctatgctaacggcttaactgatggtgtatgggttgcgcgcgaaaagatccacgggacgaacttttcgctgattatcgagcgtgataatgtaacatgcgccaaacgtacaggcccgattaagcctaccgaaaccttctacggttatgaaatcgtcctgaagaaatacgataaagcgattaagacggtgcagaaatctatgtataccgccggcgccgtttcctaccaagtgttcggagaatttgctggcaacggtatctggaaaggggtcgattatggcgagaaagacttctatgtgtttgatattctgatcaatgcggaatcaggagacaacacgtacctgactgattatgaaatgcaggacttctgtaatgaatatgggtttaagatggcaccaatgcttggtcgcggcacattcgatagcctgattatgattccgaacgatttcgattcggttctcatggcttacaatgcagtggcgaaagaggacctggtaaaagcgaacaactgcgtctttgatgccaatgtgatcggtgataacactgctgaaggctatgttcttaaaccgtgtgaacccaaatggttaccgaatgggacgcgtgtggcgatcaaatgcaagaactccaaattcagcgagaagaagaaaagtgacaaaccgatcaagacacaagtcccactgacggaaattgataagaatctgctggacgtattggcctgttatattactttaaaccgcgtgaacaacgtgatctctaagattggaacagtgacgccgaaagattttgagaaagtaatgtggctgactgttcaggatattctggaagaaacgtcacgtgagggtattgttctgacgacatcggacaatcctgacctcgtcaagaaagaacttgtccgcatggtgcaggatgtgttaaaatcggcatggcgcgaactggtgtcg

SEQ ID NO: 750 - protein, 343 aa, synthetic construct
  REGION 1..343: note = variant of RNA ligase 2 from Escherichia phage RB69 (Bacteriophage RB69)
MHHHHHHGGSGMFKKYSSLENHYNSKFIEKLYANGLTDGVWVAREKIHGTNFSLIIERDNVTCAKRTGPIKPTETFYGYEIVLKKYDKAIKTVQKSMYTAGAVSYQVFGEFAGNGIWKGVDYGEKDFYVFDILINAESGDNTYLTDYEMQDFCNEYGFKMAPMLGRGTFDSLIMIPNDFDSVLMAYNAVAKEDLVKANNCVFDANVIGDNTAEGYVLKPCEPKWLPNGTRVAIKCKNSKFSEKKKSDKPIKTQVPLTEIDKNLLDVLACYITLNRVNNVISKIGTVTPKDFEKVMWLTVQDILEETSREGIVLTTSDNPDLVKKELVRMVQDVLKSAWRELVS

SEQ ID NO: 751 - DNA, 1029 bp, synthetic construct
  misc_feature 1..1029: note = variant of RNA ligase 2 from Escherichia phage RB69 (Bacteriophage RB69)
  source 1..1029: mol_type = other DNA
atgcatcaccatcaccatcacggtggcagcggtatgtttaagaaatattctagtctggaaaaccattacaatagcaaattcattgagaaactctatgctaacggcttaactgatggtgtatgggttgcgcgcgaaaagatccacgggacgaacttttcgctgattatcgagcgtgataatgtaacatgcgccaaacgtacaggcccgattaagcctaccgaaaccttctacggttatgaaatcgtcctgaagaaatacgataaagcgattaagacggtgcaggtgtctatgtataccgccggcgccgtttcctaccaagtgttcggagaatttgctggcaacggtatctggaaaggggtcgattatggcgagaaagacttctatgtgtttgatattctgatcaatgcggaatcaggagacaacacgtacctgactgattatgaaatgcaggacttctgtaatgaatttgggtttaagatggcaccaatgcttggtcgcggcaccttcgatagcctgattatgattccgaacgatttcgattcggttctcatggcttacaatgcagtggcgaaagaggacctggtaaaagcgaacaactgcgtctttgatgccaatgtgatcggtgataacactgctgaaggctatgttcttaaaccgtgtgaacccaaatggttaccgaatgggacgcgtgtggcgatcaaatgcaagaactccaaattcagcgagaagaagaaaagtgacaaaccgatcaagacacaagtcccactgacggaaattgataagaatctgctggacgtattggcctgttatgttactttaaaccgcgtgaacaacgtgatctctaagattggaacagtgacgccgcatgattttgagaaagtaatgtggctgactgttcaggatattctggaagaaacgtcacgtgagggtattgttctgacgacatcggacaatcctgacctcgtcaagaaagaacttgtccgcatggtgcaggatgtgttaaaatcgggctggcgcgaactggtgtcg

SEQ ID NO: 752 - protein, 343 aa, synthetic construct
  REGION 1..343: note = variant of RNA ligase 2 from Escherichia phage RB69 (Bacteriophage RB69)
MHHHHHHGGSGMFKKYSSLENHYNSKFIEKLYANGLTDGVWVAREKIHGTNFSLIIERDNVTCAKRTGPIKPTETFYGYEIVLKKYDKAIKTVQVSMYTAGAVSYQVFGEFAGNGIWKGVDYGEKDFYVFDILINAESGDNTYLTDYEMQDFCNEFGFKMAPMLGRGTFDSLIMIPNDFDSVLMAYNAVAKEDLVKANNCVFDANVIGDNTAEGYVLKPCEPKWLPNGTRVAIKCKNSKFSEKKKSDKPIKTQVPLTEIDKNLLDVLACYVTLNRVNNVISKIGTVTPHDFEKVMWLTVQDILEETSREGIVLTTSDNPDLVKKELVRMVQDVLKSGWRELVS

SEQ ID NO: 753 - DNA, 1029 bp, synthetic construct
  misc_feature 1..1029: note = variant of RNA ligase 2 from Escherichia phage RB69 (Bacteriophage RB69)
  source 1..1029: mol_type = other DNA
atgcatcaccatcaccatcacggtggcagcggtatgtttaagaaatattctagtctggaaaaccattacaatagcaaattcattgagaaactctatgctaacggcttaactgatggtgtatgggttgcgcgcgaaaagatccacgggacgaacttttcgctgattatcgagcgtgataatgtaacatgcgccaaacgtacaggcccgattaagcctaccgaaaccttctacggttatgaaatcgtcctgaagaaatacgataaagcgattaagacggtgcagaaatctatgtataccgccggcgccgtttcctaccaagtgttcggagaatttgctggcaacggtatctggaaaggggtcgattatggcgagaaagacttctatgtgtttgatattctgatcaatgcggaatcaggagacaacacgtacctgactgattatgaaatgcaggacttctgtaatgaatgtgggtttaagatggcaccaatgcttggtcgcggcaccttcgatagcctgattatgattccgaacgatttcgattcggttctcatggcttacaatgcagtggcgaaagaggacctggtaaaagcgaacaactgcgtctttgatgccaatgtgatcggtgataacactgctgaaggctatgttcttaaaccgtgtgaacccaaatggttaccgaatgggacgcgtgtggcgatcaaatgcaagaactccaaattcagcgagaagaagaaaagtgacaaaccgatcaagacacaagtcccactgacggaaattgataagaatctgctggacgtattggcctgttatgtcactttaaaccgcgtgaacaacgtgatctctaagattggaacagtgacgccgaaagattttgagaaagtaatgtggctgactgttcaagatattctggaagaaacgtcacgtgagggtattgttctgacgacatcggacaatcctgacctcgtcaagaaagaacttgtccgcatggtgcaggatgtgttaaaatcggcatggcgcgaactggtgtcg

SEQ ID NO: 754 - protein, 343 aa, synthetic construct
  REGION 1..343: note = variant of RNA ligase 2 from Escherichia phage RB69 (Bacteriophage RB69)
MHHHHHHGGSGMFKKYSSLENHYNSKFIEKLYANGLTDGVWVAREKIHGTNFSLIIERDNVTCAKRTGPIKPTETFYGYEIVLKKYDKAIKTVQKSMYTAGAVSYQVFGEFAGNGIWKGVDYGEKDFYVFDILINAESGDNTYLTDYEMQDFCNECGFKMAPMLGRGTFDSLIMIPNDFDSVLMAYNAVAKEDLVKANNCVFDANVIGDNTAEGYVLKPCEPKWLPNGTRVAIKCKNSKFSEKKKSDKPIKTQVPLTEIDKNLLDVLACYVTLNRVNNVISKIGTVTPKDFEKVMWLTVQDILEETSREGIVLTTSDNPDLVKKELVRMVQDVLKSAWRELVS

SEQ ID NO: 755 - DNA, 1029 bp, synthetic construct
  misc_feature 1..1029: note = variant of RNA ligase 2 from Escherichia phage RB69 (Bacteriophage RB69)
  source 1..1029: mol_type = other DNA
atgcatcaccatcaccatcacggtggcagcggtatgtttaagaaatattctagtctggaaaaccattacaatagcaaattcattgagaaactctatgctaacggcttaactgatggtgtatgggttgcgcgcgaaaagatccacgggacgaacttttcgctgattatcgagcgtgataatgtaacatgcgccaaacgtacaggcccgattaagcctaccgaaaccttctacggttatgaaatcgtcctgaagaaatacgataaagcgattaagacggtgcagaaatctatgtataccgccggcgccgtttcctaccaagtgttcggagaatttgctggcaacggtatctggaaaggggtcgattatggcgagaaagacttctatgtgtttgatattctgatcaatgcggaatcaggagacaacacgtacctgactgattatgaaatgcaggacttctgtaatgaatgtgggtttaagatggcaccaatgcttggtcgcggcacattcgatagcctgattatgattccgaacgatttcgattcggttctcatggcttacaatgcagtggcgaaagaggacctggtaaaagcgaacaactgcgtctttgatgccaatgtgatcggtgataacactgctgaaggctatgttcttaaaccgtgtgaacccaaatggttaccgaatgggacgcgtgtggcgatcaaatgcaagaactccaaattcagcgagaagaagaaaagtgacaaaccgatcaagacacaagtcccactgacggaaattgataagaatctgctggacgtattggcctgttatgtcactttaaaccgcgtgaacaacgtgatctctaagattggaacagtgacgccggccgattttgagaaagtaatgtggctgactgttcaagatattctggaagaaacgtcacgtgagggtattgttctgacgacatcggacaatcctgacctcgtcaagaaagaacttgtccgcatggtgcaggatgtgttaaaatcggcatggcgcgaactggtgtcg

SEQ ID NO: 756 - protein, 343 aa, synthetic construct
  REGION 1..343: note = variant of RNA ligase 2 from Escherichia phage RB69 (Bacteriophage RB69)
MHHHHHHGGSGMFKKYSSLENHYNSKFIEKLYANGLTDGVWVAREKIHGTNFSLIIERDNVTCAKRTGPIKPTETFYGYEIVLKKYDKAIKTVQKSMYTAGAVSYQVFGEFAGNGIWKGVDYGEKDFYVFDILINAESGDNTYLTDYEMQDFCNECGFKMAPMLGRGTFDSLIMIPNDFDSVLMAYNAVAKEDLVKANNCVFDANVIGDNTAEGYVLKPCEPKWLPNGTRVAIKCKNSKFSEKKKSDKPIKTQVPLTEIDKNLLDVLACYVTLNRVNNVISKIGTVTPADFEKVMWLTVQDILEETSREGIVLTTSDNPDLVKKELVRMVQDVLKSAWRELVS

SEQ ID NO: 757 - DNA, 1029 bp, synthetic construct
  misc_feature 1..1029: note = variant of RNA ligase 2 from Escherichia phage RB69 (Bacteriophage RB69)
  source 1..1029: mol_type = other DNA
atgcatcaccatcaccatcacggtggcagcggtatgtttaagaaatattctagtctggaaaaccattacaatagcaaattcattgagaaactctatgctaacggcttaactgatggtgtatgggttgcgcgcgaaaagatccacgggacgaacttttcgctgattatcgagcgtgataatgtaacatgcgccaaacgtacaggcccgattaagcctaccgaaaccttctacggttatgaaatcgtcctgaagaaatacgataaagcgattaagacggtgcagaaatctatgtataccgccggcgccgtttcctaccaagtgttcggagaatttgctggcaacggtatctggaaaggggtcgattatggcgagaaagacttctatgtgtttgatattctgatcaatgcggaatcaggagacaacacgtacctgactgattatgaaatgcaggacttctgtaatgaatatgggtttaagatggcaccaatgcttggtcgcggcaccttcgatagcctgattatgattccgaacgatttcgattcggttctcatggcttacaatgcagtggcgaaagaggacctggtaaaagcgaacaactgcgtctttgatgccaatgtgatcggtgataacactgctgaaggctatgttcttaaaccgtgtgaacccaaatggttaccgaatgggacgcgtgtggcgatcaaatgcaagaactccaaattcagcgagaagaagaaaagtgacaaaccgatcaagacacaagtcccactgacggaaattgataagaatctgctggacgtattggcctgttatattactttaaaccgcgtgaacaacgtgatctctaagattggaacagtgacgccgcatgattttgagaaagtaatgtggctgactgttgaagatattctggaagaaacgtcacgtgagggtattgttctgacgacatcggacaatcctgacctcgtcaagaaagaacttgtccgcatggtgcaggatgtgttaaaatcggcctggcgcgaactggtgtcg

SEQ ID NO: 758 - protein, 343 aa, synthetic construct
  REGION 1..343: note = variant of RNA ligase 2 from Escherichia phage RB69 (Bacteriophage RB69)
MHHHHHHGGSGMFKKYSSLENHYNSKFIEKLYANGLTDGVWVAREKIHGTNFSLIIERDNVTCAKRTGPIKPTETFYGYEIVLKKYDKAIKTVQKSMYTAGAVSYQVFGEFAGNGIWKGVDYGEKDFYVFDILINAESGDNTYLTDYEMQDFCNEYGFKMAPMLGRGTFDSLIMIPNDFDSVLMAYNAVAKEDLVKANNCVFDANVIGDNTAEGYVLKPCEPKWLPNGTRVAIKCKNSKFSEKKKSDKPIKTQVPLTEIDKNLLDVLACYITLNRVNNVISKIGTVTPHDFEKVMWLTVEDILEETSREGIVLTTSDNPDLVKKELVRMVQDVLKSAWRELVS

SEQ ID NO: 759 - DNA, 1029 bp, synthetic construct
  misc_feature 1..1029: note = variant of RNA ligase 2 from Escherichia phage RB69 (Bacteriophage RB69)
  source 1..1029: mol_type = other DNA
atgcatcaccatcaccatcacggtggcagcggtatgtttaagaaatattctagtctggaaaaccattacaatagcaaattcattgagaaactctatgctaacggcttaactgatggtgtatgggttgcgcgcgaaaagatccacgggacgaacttttcgctgattatcgagcgtgataatgtaacatgcgccaaacgtacaggcccgattaagcctaccgaaaccttctacggttatgaaatcgtcctgaagaaatacgataaagcgattaagacggtgcagaaatctatgtataccgccggcgccgtttcctaccaagtgttcggagaatttgctggcaacggtatctggaaaggggtcgattatggcgagaaagacttctatgtgtttgatattctgatcaatgcggaatcaggagacaacacgtacctgactgattatgaaatgcaggacttctgtaatgaatttgggtttaagatggcaccaatgcttggtcgcggcgccttcgatagcctgattatgattccgaacgatttcgattcggttctcatggcttacaatgcaaccgcgaaagaggacctggtaaaagcgaacaactgcgtctttgatgccaatgtgatcggtgataacactgctgaaggctatgttcttaaaccgtgtgaacccaaatggttaccgaatgggacgcgtgtggcgatcaaatgcaagaactccaaattcagcgagaagaagaaaagtgacaaaccgatcaagacacaagtcccactgacggaaattgataagaatctgctggacgtattggcctgttatgttactttaaaccgcgtgaacaacgtgatctctaagattggaacagtgacgccggccgattttgagaaagtaatgtggctgactgttcaggatattctggaagaaacgtcacgtgagggtattgttctgacgacatcggacaatcctgacctcgtcaagaaagaacttgtccgcatggtgcaggatgagttaaaatcggcctggcgcgaactggtgtcg

SEQ ID NO: 760 - protein, 343 aa, synthetic construct
  REGION 1..343: note = variant of RNA ligase 2 from Escherichia phage RB69 (Bacteriophage RB69)
MHHHHHHGGSGMFKKYSSLENHYNSKFIEKLYANGLTDGVWVAREKIHGTNFSLIIERDNVTCAKRTGPIKPTETFYGYEIVLKKYDKAIKTVQKSMYTAGAVSYQVFGEFAGNGIWKGVDYGEKDFYVFDILINAESGDNTYLTDYEMQDFCNEFGFKMAPMLGRGAFDSLIMIPNDFDSVLMAYNATAKEDLVKANNCVFDANVIGDNTAEGYVLKPCEPKWLPNGTRVAIKCKNSKFSEKKKSDKPIKTQVPLTEIDKNLLDVLACYVTLNRVNNVISKIGTVTPADFEKVMWLTVQDILEETSREGIVLTTSDNPDLVKKELVRMVQDELKSAWRELVS

SEQ ID NO: 761 - DNA, 1029 bp, synthetic construct
  misc_feature 1..1029: note = variant of RNA ligase 2 from Escherichia phage RB69 (Bacteriophage RB69)
  source 1..1029: mol_type = other DNA
atgcatcaccatcaccatcacggtggcagcggtatgtttaagaaatattctagtctggaaaaccattacaatagcaaattcattgagaaactctatgctaacggcttaactgatggtgtatgggttgcgcgcgaaaagatccacgggacgaacttttcgctgattatcgagcgtgataatgtaacatgcgccaaacgtacaggcccgattaagcctaccgaaaccttctacggttatgaaatcgtcctgaagaaatacgataaagcgattaagacggtgcagaaatctatgtataccgccggcgccgtttcctaccaagtgttcggagaatttgctggcaacggtatctggaaaggggtcgattatggcgagaaagacttctatgtgtttgatattctgatcaatgcggaatcaggagacaacacgtacctgactgattatgaaatgcaggacttctgtaatgaatgtgggtttaagatggcaccaatgcttggtcgcggcgccttcgatagcctgattatgattccgaacgatttcgattcggttctcatggcttacaatgcagtggcgaaagaggacctggtaaaagcgaacaactgcgtctttgatgccaatgtgatcggtgataacactgctgaaggctatgttcttaaaccgtgtgaacccaaatggttaccgaatgggacgcgtgtggcgatcaaatgcaagaactccaaattcagcgagaagaagaaaagtgacaaaccgatcaagacacaagtcccactgacggaaattgataagaatctgctggacgtattggcctgttatgttactttaaaccgcgtgaacaacgtgatctctaagattggaacagtgacgccgaaagattttgagaaagtaatgtggctgactgttcaagatattctggaagaaacgtcacgtgagggtattgttctgacgacatcggacaatcctgacctcgtcaagaaagaacttgtccgcatggtgcaggatgagttaaaatcggcctggcgcgaactggtgtcg

SEQ ID NO: 762 - protein, 343 aa, synthetic construct
  REGION 1..343: note = variant of RNA ligase 2 from Escherichia phage RB69 (Bacteriophage RB69)
MHHHHHHGGSGMFKKYSSLENHYNSKFIEKLYANGLTDGVWVAREKIHGTNFSLIIERDNVTCAKRTGPIKPTETFYGYEIVLKKYDKAIKTVQKSMYTAGAVSYQVFGEFAGNGIWKGVDYGEKDFYVFDILINAESGDNTYLTDYEMQDFCNECGFKMAPMLGRGAFDSLIMIPNDFDSVLMAYNAVAKEDLVKANNCVFDANVIGDNTAEGYVLKPCEPKWLPNGTRVAIKCKNSKFSEKKKSDKPIKTQVPLTEIDKNLLDVLACYVTLNRVNNVISKIGTVTPKDFEKVMWLTVQDILEETSREGIVLTTSDNPDLVKKELVRMVQDELKSAWRELVS

SEQ ID NO: 763 - DNA, 1029 bp, synthetic construct
  misc_feature 1..1029: note = variant of RNA ligase 2 from Escherichia phage RB69 (Bacteriophage RB69)
  source 1..1029: mol_type = other DNA
atgcatcaccatcaccatcacggtggcagcggtatgtttaagaaatattctagtctggaaaaccattacaatagcaaattcattgagaaactctatgctaacggcttaactgatggtgtatgggttgcgcgcgaaaagatccacgggacgaacttttcgctgattatcgagcgtgataatgtaacatgcgccaaacgtacaggcccgattaagcctaccgaaaccttctacggttatgaaatcgtcctgaagaaatacgataaagcgattaagacggtgcaggtgtctatgtataccgccggcgccgtttcctaccaagtgttcggagaatttgctggcaacggtatctggaaaggggtcgattatggcgagaaagacttctatgtgtttgatattctgatcaatgcggaatcaggagacaacacgtacctgactgattatgaaatgcaggacttctgtaatgaatgtgggtttaagatggcaccaatgcttggtcgcggcacattcgatagcctgattatgattccgaacgatttcgattcggttctcatggcttacaatgcaacggcgaaagaggacctggtaaaagcgaacaactgcgtctttgatgccaatgtgatcggtgataacactgctgaaggctatgttcttaaaccgtgtgaacccaaatggttaccgaatgggacgcgtgtggcgatcaaatgcaagaactccaaattcagcgagaagaagaaaagtgacaaaccgatcaagacacaagtcccactgacggaaattgataagaatctgctggacgtattggcctgttatgtcactttaaaccgcgtgaacaacgtgatctctaagattggaacagtgacgccgcatgattttgagaaagtaatgtggctgactgttcaggatattctggaagaaacgtcacgtgagggtattgttctgacgacatcggacaatcctgacctcgtcaagaaagaacttgtccgcatggtgcaggatgagttaaaatcggcctggcgcgaactggtgtcg

SEQ ID NO: 764 - protein, 343 aa, synthetic construct
  REGION 1..343: note = variant of RNA ligase 2 from Escherichia phage RB69 (Bacteriophage RB69)
MHHHHHHGGSGMFKKYSSLENHYNSKFIEKLYANGLTDGVWVAREKIHGTNFSLIIERDNVTCAKRTGPIKPTETFYGYEIVLKKYDKAIKTVQVSMYTAGAVSYQVFGEFAGNGIWKGVDYGEKDFYVFDILINAESGDNTYLTDYEMQDFCNECGFKMAPMLGRGTFDSLIMIPNDFDSVLMAYNATAKEDLVKANNCVFDANVIGDNTAEGYVLKPCEPKWLPNGTRVAIKCKNSKFSEKKKSDKPIKTQVPLTEIDKNLLDVLACYVTLNRVNNVISKIGTVTPHDFEKVMWLTVQDILEETSREGIVLTTSDNPDLVKKELVRMVQDELKSAWRELVS

SEQ ID NO: 765 - DNA, 1029 bp, synthetic construct
  misc_feature 1..1029: note = variant of RNA ligase 2 from Escherichia phage RB69 (Bacteriophage RB69)
  source 1..1029: mol_type = other DNA
atgcatcaccatcaccatcacggtggcagcggtatgtttaagaaatattctagtctggaaaaccattacaatagcaaattcattgagaaactctatgctaacggcttaactgatggtgtatgggttgcgcgcgaaaagatccacgggacgaacttttcgctgattatcgagcgtgataatgtaacatgcgccaaacgtacaggcccgattaagcctaccgaaaccttctacggttatgaaatcgtcctgaagaaatacgataaagcgattaagacggtgcagaaatctatgtataccgccggcgccgtttcctaccaagtgttcggagaatttgctggcaacggtatctggaaaggggtcgattatggcgagaaagacttctatgtgtttgatattctgatcaatgcggaatcaggagacaacacgtacctgactgattatgaaatgcaggacttctgtaatgaatgtgggtttaagatggcaccaatgcttggtcgcggcaccttcgatagcctgattatgattccgaacgatttcgattcggttctcatggcttacaatgcaaccgcgaaagaggacctggtaaaagcgaacaactgcgtctttgatgccaatgtgatcggtgataacactgctgaaggctatgttcttaaaccgtgtgaacccaaatggttaccgaatgggacgcgtgtggcgatcaaatgcaagaactccaaattcagcgagaagaagaaaagtgacaaaccgatcaagacacaagtcccactgacggaaattgataagaatctgctggacgtattggcctgttatgtcactttaaaccgcgtgaacaacgtgatctctaagattggaacagtgacgccgcatgattttgagaaagtaatgtggctgactgttcaggatattctggaagaaacgtcacgtgagggtattgttctgacgacatcggacaatcctgacctcgtcaagaaagaacttgtccgcatggtgcaggatgagttaaaatcggcctggcgcgaactggtgccg

SEQ ID NO: 766 - protein, 343 aa, synthetic construct
  REGION 1..343: note = variant of RNA ligase 2 from Escherichia phage RB69 (Bacteriophage RB69)
MHHHHHHGGSGMFKKYSSLENHYNSKFIEKLYANGLTDGVWVAREKIHGTNFSLIIERDNVTCAKRTGPIKPTETFYGYEIVLKKYDKAIKTVQKSMYTAGAVSYQVFGEFAGNGIWKGVDYGEKDFYVFDILINAESGDNTYLTDYEMQDFCNECGFKMAPMLGRGTFDSLIMIPNDFDSVLMAYNATAKEDLVKANNCVFDANVIGDNTAEGYVLKPCEPKWLPNGTRVAIKCKNSKFSEKKKSDKPIKTQVPLTEIDKNLLDVLACYVTLNRVNNVISKIGTVTPHDFEKVMWLTVQDILEETSREGIVLTTSDNPDLVKKELVRMVQDELKSAWRELVP

SEQ ID NO: 767 - DNA, 1029 bp, synthetic construct
  misc_feature 1..1029: note = variant of RNA ligase 2 from Escherichia phage RB69 (Bacteriophage RB69)
  source 1..1029: mol_type = other DNA
atgcatcaccatcaccatcacggtggcagcggtatgtttaagaaatattctagtctggaaaaccattacaatagcaaattcattgagaaactctatgctaacggcttaactgatggtgtatgggttgcgcgcgaaaagatccacgggacgaacttttcgctgattatcgagcgtgataatgtaacatgcgccaaacgtacaggcccgattaagcctaccgaaaccttctacggttatgaaatcgtcctgaagaaatacgataaagcgattaagacggtgcagaaatctatgtataccgccggcgccgtttcctaccaagtgttcggagaatttgctggcaacggtatctggaaaggggtcgattatggcgagaaagacttctatgtgtttgatattctgatcaatgcggaatcaggagacaacacgtacctgactgattatgaaatgcaggacttctgtaatgaatttgggtttaagatggcaccaatgcttggtcgcggcacattcgatagcctgattatgattccgaacgatttcgattcggttctcatggcttacaatgcagtggcgaaagaggacctggtaaaagcgaacaactgcgtctttgatgccaatgtgatcggtgataacactgctgaaggctatgttcttaaaccgtgtgaacccaaatggttaccgaatgggacgcgtgtggcgatcaaatgcaagaactccaaattcagcgagaagaagaaaagtgacaaaccgatcaagacacaagtcccactgacggaaattgataagaatctgctggacgtattggcctgttatgtcactttaaaccgcgtgaacaacgtgatctctaagattggaacagtgacgccggccgattttgagaaagtaatgtggctgactgttcaggatattctggaagaaacgtcacgtgagggtattgttctgacgacatcggacaatcctgacctcgtcaagaaagaacttgtccgcatggtgcaggatgtgttaaaatcggcctggcgcgaactggtgtcg

SEQ ID NO: 768 - protein, 343 aa, synthetic construct
  REGION 1..343: note = variant of RNA ligase 2 from Escherichia phage RB69 (Bacteriophage RB69)
MHHHHHHGGSGMFKKYSSLENHYNSKFIEKLYANGLTDGVWVAREKIHGTNFSLIIERDNVTCAKRTGPIKPTETFYGYEIVLKKYDKAIKTVQKSMYTAGAVSYQVFGEFAGNGIWKGVDYGEKDFYVFDILINAESGDNTYLTDYEMQDFCNEFGFKMAPMLGRGTFDSLIMIPNDFDSVLMAYNAVAKEDLVKANNCVFDANVIGDNTAEGYVLKPCEPKWLPNGTRVAIKCKNSKFSEKKKSDKPIKTQVPLTEIDKNLLDVLACYVTLNRVNNVISKIGTVTPADFEKVMWLTVQDILEETSREGIVLTTSDNPDLVKKELVRMVQDVLKSAWRELVS

SEQ ID NO: 769 - DNA, 1029 bp, synthetic construct
  misc_feature 1..1029: note = variant of RNA ligase 2 from Escherichia phage RB69 (Bacteriophage RB69)
  source 1..1029: mol_type = other DNA
atgcatcaccatcaccatcacggtggcagcggtatgtttaagaaatattctagtctggaaaaccattacaatagcaaattcattgagaaactctatgctaacggcttaactgatggtgtatgggttgcgcgcgaaaagatccacgggacgaacttttcgctgattatcgagcgtgataatgtaacatgcgccaaacgtacaggcccgattaagcctaccgaaaccttctacggttatgaaatcgtcctgaagaaatacgataaagcgattaagacggtgcaggtgtctatgtataccgccggcgccgtttcctaccaagtgttcggagaatttgctggcaacggtatctggaaaggggtcgattatggcgagaaagacttctatgtgtttgatattctgatcaatgcggaatcaggagacaacacgtacctgactgattatgaaatgcaggacttctgtaatgaatgtgggtttaagatggcaccaatgcttggtcgcggcaccttcgatagcctgattatgattccgaacgatttcgattcggttctcatggcttacaatgcaacggcgaaagaggacctggtaaaagcgaacaactgcgtctttgatgccaatgtgatcggtgataacactgctgaaggctatgttcttaaaccgtgtgaacccaaatggttaccgaatgggacgcgtgtggcgatcaaatgcaagaactccaaattcagcgagaagaagaaaagtgacaaaccgatcaagacacaagtcccactgacggaaattgataagaatctgctggacgtattggcctgttatgtcactttaaaccgcgtgaacaacgtgatctctaagattggaacagtgacgccggccgattttgagaaagtaatgtggctgactgttgaagatattctggaagaaacgtcacgtgagggtattgttctgacgacatcggacaatcctgacctcgtcaagaaagaacttgtccgcatggtgcaggatgtgttaaaatcggcatggcgcgaactggtgtcg

SEQ ID NO: 770 - protein, 343 aa, synthetic construct
  REGION 1..343: note = variant of RNA ligase 2 from Escherichia phage RB69 (Bacteriophage RB69)
MHHHHHHGGSGMFKKYSSLENHYNSKFIEKLYANGLTDGVWVAREKIHGTNFSLIIERDNVTCAKRTGPIKPTETFYGYEIVLKKYDKAIKTVQVSMYTAGAVSYQVFGEFAGNGIWKGVDYGEKDFYVFDILINAESGDNTYLTDYEMQDFCNECGFKMAPMLGRGTFDSLIMIPNDFDSVLMAYNATAKEDLVKANNCVFDANVIGDNTAEGYVLKPCEPKWLPNGTRVAIKCKNSKFSEKKKSDKPIKTQVPLTEIDKNLLDVLACYVTLNRVNNVISKIGTVTPADFEKVMWLTVEDILEETSREGIVLTTSDNPDLVKKELVRMVQDVLKSAWRELVS

SEQ ID NO: 771 - DNA, 1029 bp, synthetic construct
  misc_feature 1..1029: note = variant of RNA ligase 2 from Escherichia phage RB69 (Bacteriophage RB69)
  source 1..1029: mol_type = other DNA
atgcatcaccatcaccatcacggtggcagcggtatgtttaagaaatattctagtctggaaaaccattacaatagcaaattcattgagaaactctatgctaacggcttaactgatggtgtatgggttgcgcgcgaaaagatccacgggacgaacttttcgctgattatcgagcgtgataatgtaacatgcgccaaacgtacaggcccgattaagcctaccgaaaccttctacggttatgaaatcgtcctgaagaaatacgataaagcgattaagacggtgcaggtgtctatgtataccgccggcgccgtttcctaccaagtgttcggagaatttgctggcaacggtatctggaaaggggtcgattatggcgagaaagacttctatgtgtttgatattctgatcaatgcggaatcaggagacaacacgtacctgactgattatgaaatgcaggacttctgtaatgaatatgggtttaagatggcaccaatgcttggtcgcggcaccttcgatagcctgattatgattccgaacgatttcgattcggttctcatggcttacaatgcagtggcgaaagaggacctggtaaaagcgaacaacagcgtctttgatgccaatgtgatcggtgataacactgctgaaggctatgttcttaaaccgtgtgaacccaaatggttaccgaatgggacgcgtgtggcgatcaaatgcaagaactccaaattcagcgagaagaagaaaagtgacaaaccgatcaagacacaagtcccactgacggaaattgataagaatctgctggacgtattggcctgttatgtcactttaaaccgcgtgaacaacgtgatctctaagattggaacagtgacgccgcatgattttgagaaagtaatgtggctgactgttgaagatattctggaagaaacgtcacgtgagggtattgttctgacgacatcggacaatcctgacctcgtcaagaaagaacttgtccgcatggtgcaggatgagttaaaatcgggctggcgcgaactggtgtcg

SEQ ID NO: 772 - protein, 343 aa, synthetic construct
  REGION 1..343: note = variant of RNA ligase 2 from Escherichia phage RB69 (Bacteriophage RB69)
MHHHHHHGGSGMFKKYSSLENHYNSKFIEKLYANGLTDGVWVAREKIHGTNFSLIIERDNVTCAKRTGPIKPTETFYGYEIVLKKYDKAIKTVQVSMYTAGAVSYQVFGEFAGNGIWKGVDYGEKDFYVFDILINAESGDNTYLTDYEMQDFCNEYGFKMAPMLGRGTFDSLIMIPNDFDSVLMAYNAVAKEDLVKANNSVFDANVIGDNTAEGYVLKPCEPKWLPNGTRVAIKCKNSKFSEKKKSDKPIKTQVPLTEIDKNLLDVLACYVTLNRVNNVISKIGTVTPHDFEKVMWLTVEDILEETSREGIVLTTSDNPDLVKKELVRMVQDELKSGWRELVS

SEQ ID NO: 773 - DNA, 1029 bp, synthetic construct
  misc_feature 1..1029: note = variant of RNA ligase 2 from Escherichia phage RB69 (Bacteriophage RB69)
  source 1..1029: mol_type = other DNA
atgcatcaccatcaccatcacggtggcagcggtatgtttaagaaatattctagtctggaaaaccattacaatagcaaattcattgagaaactctatgctaacggcttaactgatggtgtatgggttgcgcgcgaaaagatccacgggacgaacttttcgctgattatcgagcgtgataatgtaacatgcgccaaacgtacaggcccgattaagcctaccgaaaccttctacggttatgaaatcgtcctgaagaaatacgataaagcgattaagacggtgcagaaatctatgtataccgccggcgccgtttcctaccaagtgttcggagaatttgctggcaacggtatctggaaaggggtcgattatggcgagaaagacttctatgtgtttgatattctgatcaatgcggaatcaggagacaacacgtacctgactgattatgaaatgcaggacttctgtaatgaatgtgggtttaagatggcaccaatgcttggtcgcggcacattcgatagcctgattatgattccgaacgatttcgattcggttctcatggcttacaatgcagtggcgaaagaggacctggtaaaagcgaacaacaccgtctttgatgccaatgtgatcggtgataacactgctgaaggctatgttcttaaaccgtgtgaacccaaatggttaccgaatgggacgcgtgtggcgatcaaatgcaagaactccaaattcagcgagaagaagaaaagtgacaaaccgatcaagacacaagtcccactgacggaaattgataagaatctgctggacgtattggcctgttatattactttaaaccgcgtgaacaacgtgatctctaagattggaacagtgacgccgaaagattttgagaaagtaatgtggctgactgttcaggatattctggaagaaacgtcacgtgagggtattgttctgacgacatcggacaatcctgacctcgtcaagaaagaacttgtccgcatggtgcaggatgtgttaaaatcgggctggcgcgaactggtgtcg

SEQ ID NO: 774 - protein, 343 aa, synthetic construct
  REGION 1..343: note = variant of RNA ligase 2 from Escherichia phage RB69 (Bacteriophage RB69)
MHHHHHHGGSGMFKKYSSLENHYNSKFIEKLYANGLTDGVWVAREKIHGTNFSLIIERDNVTCAKRTGPIKPTETFYGYEIVLKKYDKAIKTVQKSMYTAGAVSYQVFGEFAGNGIWKGVDYGEKDFYVFDILINAESGDNTYLTDYEMQDFCNECGFKMAPMLGRGTFDSLIMIPNDFDSVLMAYNAVAKEDLVKANNTVFDANVIGDNTAEGYVLKPCEPKWLPNGTRVAIKCKNSKFSEKKKSDKPIKTQVPLTEIDKNLLDVLACYITLNRVNNVISKIGTVTPKDFEKVMWLTVQDILEETSREGIVLTTSDNPDLVKKELVRMVQDVLKSGWRELVS

SEQ ID NO: 775 - DNA, 1029 bp, synthetic construct
  misc_feature 1..1029: note = variant of RNA ligase 2 from Escherichia phage RB69 (Bacteriophage RB69)
  source 1..1029: mol_type = other DNA
atgcatcaccatcaccatcacggtggcagcggtatgtttaagaaatattctagtctggaaaaccattacaatagcaaattcattgagaaactctatgctaacggcttaactgatggtgtatgggttgcgcgcgaaaagatccacgggacgaacttttcgctgattatcgagcgtgataatgtaacatgcgccaaacgtacaggcccgattaagcctaccgaaaccttctacggttatgaaatcgtcctgaagaaatacgataaagcgattaagacggtgcaggtgtctatgtataccgccggcgccgtttcctaccaagtgttcggagaatttgctggcaacggtatctggaaaggggtcgattatggcgagaaagacttctatgtgtttgatattctgatcaatgcggaatcaggagacaacacgtacctgactgattatgaaatgcaggacttctgtaatgaatatgggtttaagatggcaccaatgcttggtcgcggcgccttcgatagcctgattatgattccgaacgatttcgattcggttctcatggcttacaatgcagtggcgaaagaggacctggtaaaagcgaacaactgcgtctttgatgccaatgtgatcggtgataacactgctgaaggctatgttcttaaaccgtgtgaacccaaatggttaccgaatgggacgcgtgtggcgatcaaatgcaagaactccaaattcagcgagaagaagaaaagtgacaaaccgatcaagacacaagtcccactgacggaaattgataagaatctgctggacgtattggcctgttatgttactttaaaccgcgtgaacaacgtgatctctaagattggaacagtgacgccgaaagattttgagaaagtaatgtggctgactgttcaagatattctggaagaaacgtcacgtgagggtattgttctgacgacatcggacaatcctgacctcgtcaagaaagaacttgtccgcatggtgcaggatgtgttaaaatcgggctggcgcgaactggtgtcg

SEQ ID NO: 776 - protein, 343 aa, synthetic construct
  REGION 1..343: note = variant of RNA ligase 2 from Escherichia phage RB69 (Bacteriophage RB69)
MHHHHHHGGSGMFKKYSSLENHYNSKFIEKLYANGLTDGVWVAREKIHGTNFSLIIERDNVTCAKRTGPIKPTETFYGYEIVLKKYDKAIKTVQVSMYTAGAVSYQVFGEFAGNGIWKGVDYGEKDFYVFDILINAESGDNTYLTDYEMQDFCNEYGFKMAPMLGRGAFDSLIMIPNDFDSVLMAYNAVAKEDLVKANNCVFDANVIGDNTAEGYVLKPCEPKWLPNGTRVAIKCKNSKFSEKKKSDKPIKTQVPLTEIDKNLLDVLACYVTLNRVNNVISKIGTVTPKDFEKVMWLTVQDILEETSREGIVLTTSDNPDLVKKELVRMVQDVLKSGWRELVS

SEQ ID NO: 777 - DNA, 1029 bp, synthetic construct
  misc_feature 1..1029: note = variant of RNA ligase 2 from Escherichia phage RB69 (Bacteriophage RB69)
  source 1..1029: mol_type = other DNA
atgcatcaccatcaccatcacggtggcagcggtatgtttaagaaatattctagtctggaaaaccattacaatagcaaattcattgagaaactctatgctaacggcttaactgatggtgtatgggttgcgcgcgaaaagatccacgggacgaacttttcgctgattatcgagcgtgataatgtaacatgcgccaaacgtacaggcccgattaagcctaccgaaaccttctacggttatgaaatcgtcctgaagaaatacgataaagcgattaagacggtgcagaaatctatgtataccgccggcgccgtttcctaccaagtgttcggagaatttgctggcaacggtatctggaaaggggtcgattatggcgagaaagacttctatgtgtttgatattctgatcaatgcggaatcaggagacaacacgtacctgactgattatgaaatgcaggacttctgtaatgaatttgggtttaagatggcaccaatgcttggtcgcggcacattcgatagcctgattatgattccgaacgatttcgattcggttctcatggcttacaatgcaaccgcgaaagaggacctggtaaaagcgaacaactgcgtctttgatgccaatgtgatcggtgataacactgctgaaggctatgttcttaaaccgtgtgaacccaaatggttaccgaatgggacgcgtgtggcgatcaaatgcaagaactccaaattcagcgagaagaagaaaagtgacaaaccgatcaagacacaagtcccactgacggaaattgataagaatctgctggacgtattggcctgttatgtcactttaaaccgcgtgaacaacgtgatctctaagattggaacagtgacgccgaaagattttgagaaagtaatgtggctgactgttcaggatattctggaagaaacgtcacgtgagggtattgttctgacgacatcggacaatcctgacctcgtcaagaaagaacttgtccgcatggtgcaggatgtgttaaaatcggcatggcgcgaactggtgtcg

SEQ ID NO: 778 - protein, 343 aa, synthetic construct
  REGION 1..343: note = variant of RNA ligase 2 from Escherichia phage RB69 (Bacteriophage RB69)
MHHHHHHGGSGMFKKYSSLENHYNSKFIEKLYANGLTDGVWVAREKIHGTNFSLIIERDNVTCAKRTGPIKPTETFYGYEIVLKKYDKAIKTVQKSMYTAGAVSYQVFGEFAGNGIWKGVDYGEKDFYVFDILINAESGDNTYLTDYEMQDFCNEFGFKMAPMLGRGTFDSLIMIPNDFDSVLMAYNATAKEDLVKANNCVFDANVIGDNTAEGYVLKPCEPKWLPNGTRVAIKCKNSKFSEKKKSDKPIKTQVPLTEIDKNLLDVLACYVTLNRVNNVISKIGTVTPKDFEKVMWLTVQDILEETSREGIVLTTSDNPDLVKKELVRMVQDVLKSAWRELVS

SEQ ID NO: 779 - DNA, 1029 bp, synthetic construct
  misc_feature 1..1029: note = variant of RNA ligase 2 from Escherichia phage RB69 (Bacteriophage RB69)
  source 1..1029: mol_type = other DNA
atgcatcaccatcaccatcacggtggcagcggtatgtttaagaaatattctagtctggaaaaccattacaatagcaaattcattgagaaactctatgctaacggcttaactgatggtgtatgggttgcgcgcgaaaagatccacgggacgaacttttcgctgattatcgagcgtgataatgtaacatgcgccaaacgtacaggcccgattaagcctaccgaaaccttctacggttatgaaatcgtcctgaagaaatacgataaagcgattaagacggtgcaggtgtctatgtataccgccggcgccgtttcctaccaagtgttcggagaatttgctggcaacggtatctggaaaggggtcgattatggcgagaaagacttctatgtgtttgatattctgatcaatgcggaatcaggagacaacacgtacctgactgattatgaaatgcaggacttctgtaatgaatgtgggtttaagatggcaccaatgcttggtcgcggcacattcgatagcctgattatgattccgaacgatttcgattcggttctcatggcttacaatgcaaccgcgaaagaggacctggtaaaagcgaacaactgcgtctttgatgccaatgtgatcggtgataacactgctgaaggctatgttcttaaaccgtgtgaacccaaatggttaccgaatgggacgcgtgtggcgatcaaatgcaagaactccaaattcagcgagaagaagaaaagtgacaaaccgatcaagacacaagtcccactgacggaaattgataagaatctgctggacgtattggcctgttatgtcactttaaaccgcgtgaacaacgtgatctctaagattggaacagtgacgccggccgattttgagaaagtaatgtggctgactgttcaggatattctggaagaaacgtcacgtgagggtattgttctgacgacatcggacaatcctgacctcgtcaagaaagaacttgtccgcatggtgcaggatgtgttaaaatcggcatggcgcgaactggtgtcg

SEQ ID NO: 780 - protein, 343 aa, synthetic construct
  REGION 1..343: note = variant of RNA ligase 2 from Escherichia phage RB69 (Bacteriophage RB69)
MHHHHHHGGSGMFKKYSSLENHYNSKFIEKLYANGLTDGVWVAREKIHGTNFSLIIERDNVTCAKRTGPIKPTETFYGYEIVLKKYDKAIKTVQVSMYTAGAVSYQVFGEFAGNGIWKGVDYGEKDFYVFDILINAESGDNTYLTDYEMQDFCNECGFKMAPMLGRGTFDSLIMIPNDFDSVLMAYNATAKEDLVKANNCVFDANVIGDNTAEGYVLKPCEPKWLPNGTRVAIKCKNSKFSEKKKSDKPIKTQVPLTEIDKNLLDVLACYVTLNRVNNVISKIGTVTPADFEKVMWLTVQDILEETSREGIVLTTSDNPDLVKKELVRMVQDVLKSAWRELVS

SEQ ID NO: 781 - DNA, 1029 bp, synthetic construct
  misc_feature 1..1029: note = variant of RNA ligase 2 from Escherichia phage RB69 (Bacteriophage RB69)
  source 1..1029: mol_type = other DNA
atgcatcaccatcaccatcacggtggcagcggtatgtttaagaaatattctagtctggaaaaccattacaatagcaaattcattgagaaactctatgctaacggcttaactgatggtgtatgggttgcgcgcgaaaagatccacgggacgaacttttcgctgattatcgagcgtgataatgtaacatgcgccaaacgtacaggcccgattaagcctaccgaaaccttctacggttatgaaatcgtcctgaagaaatacgataaagcgattaagacggtgcagaaatctatgtataccgccggcgccgtttcctaccaagtgttcggagaatttgctggcaacggtatctggaaaggggtcgattatggcgagaaagacttctatgtgtttgatattctgatcaatgcggaatcaggagacaacacgtacctgactgattatgaaatgcaggacttctgtaatgaatatgggtttaagatggcaccaatgcttggtcgcggcgccttcgatagcctgattatgattccgaacgatttcgattcggttctcatggcttacaatgcaacggcgaaagaggacctggtaaaagcgaacaactgcgtctttgatgccaatgtgatcggtgataacactgctgaaggctatgttcttaaaccgtgtgaacccaaatggttaccgaatgggacgcgtgtggcgatcaaatgcaagaactccaaattcagcgagaagaagaaaagtgacaaaccgatcaagacacaagtcccactgacggaaattgataagaatctgctggacgtattggcctgttatgtcactttaaaccgcgtgaacaacgtgatctctaagattggaacagtgacgccggccgattttgagaaagtaatgtggctgactgttcaggatattctggaagaaacgtcacgtgagggtattgttctgacgacatcggacaatcctgacctcgtcaagaaagaacttgtccgcatggtgcaggatgtgttaaaatcggcatggcgcgaactggtgtcg

SEQ ID NO: 782 - protein, 343 aa, synthetic construct
  REGION 1..343: note = variant of RNA ligase 2 from Escherichia phage RB69 (Bacteriophage RB69)
MHHHHHHGGSGMFKKYSSLENHYNSKFIEKLYANGLTDGVWVAREKIHGTNFSLIIERDNVTCAKRTGPIKPTETFYGYEIVLKKYDKAIKTVQKSMYTAGAVSYQVFGEFAGNGIWKGVDYGEKDFYVFDILINAESGDNTYLTDYEMQDFCNEYGFKMAPMLGRGAFDSLIMIPNDFDSVLMAYNATAKEDLVKANNCVFDANVIGDNTAEGYVLKPCEPKWLPNGTRVAIKCKNSKFSEKKKSDKPIKTQVPLTEIDKNLLDVLACYVTLNRVNNVISKIGTVTPADFEKVMWLTVQDILEETSREGIVLTTSDNPDLVKKELVRMVQDVLKSAWRELVS

SEQ ID NO: 783 - DNA, 1029 bp, synthetic construct
  misc_feature 1..1029: note = variant of RNA ligase 2 from Escherichia phage RB69 (Bacteriophage RB69)
  source 1..1029: mol_type = other DNA
atgcatcaccatcaccatcacggtggcagcggtatgtttaagaaatattctagtctggaaaaccattacaatagcaaattcattgagaaactctatgctaacggcttaactgatggtgtatgggttgcgcgcgaaaagatccacgggacgaacttttcgctgattatcgagcgtgataatgtaacatgcgccaaacgtacaggcccgattaagcctaccgaaaccttctacggttatgaaatcgtcctgaagaaatacgataaagcgattaagacggtgcagaaatctatgtataccgccggcgccgtttcctaccaagtgttcggagaatttgctggcaacggtatctggaaaggggtcgattatggcgagaaagacttctatgtgtttgatattctgatcaatgcggaatcaggagacaacacgtacctgactgattatgaaatgcaggacttctgtaatgaatttgggtttaagatggcaccaatgcttggtcgcggcaccttcgatagcctgattatgattccgaacgatttcgattcggttctcatggcttacaatgcaacggcgaaagaggacctggtaaaagcgaacaactgcgtctttgatgccaatgtgatcggtgataacactgctgaaggctatgttcttaaaccgtgtgaacccaaatggttaccgaatgggacgcgtgtggcgatcaaatgcaagaactccaaattcagcgagaagaagaaaagtgacaaaccgatcaagacacaagtcccactgacggaaattgataagaatctgctggacgtattggcctgttatgttactttaaaccgcgtgaacaacgtgatctctaagattggaacagtgacgccgaaagattttgagaaagtaatgtggctgactgttcaggatattctggaagaaacgtcacgtgagggtattgttctgacgacatcggacaatcctgacctcgtcaagaaagaacttgtccgcatggtgcaggatgagttaaaatcgggctggcgcgaactggtgtcg

SEQ ID NO: 784 - protein, 343 aa, synthetic construct
  REGION 1..343: note = variant of RNA ligase 2 from Escherichia phage RB69 (Bacteriophage RB69)
MHHHHHHGGSGMFKKYSSLENHYNSKFIEKLYANGLTDGVWVAREKIHGTNFSLIIERDNVTCAKRTGPIKPTETFYGYEIVLKKYDKAIKTVQKSMYTAGAVSYQVFGEFAGNGIWKGVDYGEKDFYVFDILINAESGDNTYLTDYEMQDFCNEFGFKMAPMLGRGTFDSLIMIPNDFDSVLMAYNATAKEDLVKANNCVFDANVIGDNTAEGYVLKPCEPKWLPNGTRVAIKCKNSKFSEKKKSDKPIKTQVPLTEIDKNLLDVLACYVTLNRVNNVISKIGTVTPKDFEKVMWLTVQDILEETSREGIVLTTSDNPDLVKKELVRMVQDELKSGWRELVS

SEQ ID NO: 785 - DNA, 1029 bp, synthetic construct
  misc_feature 1..1029: note = variant of RNA ligase 2 from Escherichia phage RB69 (Bacteriophage RB69)
  source 1..1029: mol_type = other DNA
atgcatcaccatcaccatcacggtggcagcggtatgtttaagaaatattctagtctggaaaaccattacaatagcaaattcattgagaaactctatgctaacggcttaactgatggtgtatgggttgcgcgcgaaaagatccacgggacgaacttttcgctgattatcgagcgtgataatgtaacatgcgccaaacgtacaggcccgattaagcctaccgaaaccttctacggttatgaaatcgtcctgaagaaatacgataaagcgattaagacggtgcagaaatctatgtataccgccggcgccgtttcctaccaagtgttcggagaatttgctggcaacggtatctggaaaggggtcgattatggcgagaaagacttctatgtgtttgatattctgatcaatgcggaatcaggagacaacacgtacctgactgattatgaaatgcaggacttctgtaatgaatttgggtttaagatggcaccaatgcttggtcgcggcacattcgatagcctgattatgattccgaacgatttcgattcggttctcatggcttacaatgcaacggcgaaagaggacctggtaaaagcgaacaactgcgtctttgatgccaatgtgatcggtgataacactgctgaaggctatgttcttaaaccgtgtgaacccaaatggttaccgaatgggacgcgtgtggcgatcaaatgcaagaactccaaattcagcgagaagaagaaaagtgacaaaccgatcaagacacaagtcccactgacggaaattgataagaatctgctggacgtattggcctgttatgttactttaaaccgcgtgaacaacgtgatctctaagattggaacagtgacgccgaaagattttgagaaagtaatgtggctgactgttcaggatattctggaagaaacgtcacgtgagggtattgttctgacgacatcggacaatcctgacctcgtcaagaaagaacttgtccgcatggtgcaggatgtgttaaaatcgggctggcgcgaactggtgtcg

SEQ ID NO: 786 - protein, 343 aa, synthetic construct
  REGION 1..343: note = variant of RNA ligase 2 from Escherichia phage RB69 (Bacteriophage RB69)
MHHHHHHGGSGMFKKYSSLENHYNSKFIEKLYANGLTDGVWVAREKIHGTNFSLIIERDNVTCAKRTGPIKPTETFYGYEIVLKKYDKAIKTVQKSMYTAGAVSYQVFGEFAGNGIWKGVDYGEKDFYVFDILINAESGDNTYLTDYEMQDFCNEFGFKMAPMLGRGTFDSLIMIPNDFDSVLMAYNATAKEDLVKANNCVFDANVIGDNTAEGYVLKPCEPKWLPNGTRVAIKCKNSKFSEKKKSDKPIKTQVPLTEIDKNLLDVLACYVTLNRVNNVISKIGTVTPKDFEKVMWLTVQDILEETSREGIVLTTSDNPDLVKKELVRMVQDVLKSGWRELVS

SEQ ID NO: 787 - DNA, 1029 bp, synthetic construct
  misc_feature 1..1029: note = variant of RNA ligase 2 from Escherichia phage RB69 (Bacteriophage RB69)
  source 1..1029: mol_type = other DNA
atgcatcaccatcaccatcacggtggcagcggtatgtttaagaaatattctagtctggaaaaccattacaatagcaaattcattgagaaactctatgctaacggcttaactgatggtgtatgggttgcgcgcgaaaagatccacgggacgaacttttcgctgattatcgagcgtgataatgtaacatgcgccaaacgtacaggcccgattaagcctaccgaaaccttctacggttatgaaatcgtcctgaagaaatacgataaagcgattaagacggtgcagaaatctatgtataccgccggcgccgtttcctaccaagtgttcggagaatttgctggcaacggtatctggaaaggggtcgattatggcgagaaagacttctatgtgtttgatattctgatcaatgcggaatcaggagacaacacgtacctgactgattatgaaatgcaggacttctgtaatgaatgtgggtttaagatggcaccaatgcttggtcgcggcacattcgatagcctgattatgattccgaacgatttcgattcggttctcatggcttacaatgcaacggcgaaagaggacctggtaaaagcgaacaactgcgtctttgatgccaatgtgatcggtgataacactgctgaaggctatgttcttaaaccgtgtgaacccaaatggttaccgaatgggacgcgtgtggcgatcaaatgcaagaactccaaattcagcgagaagaagaaaagtgacaaaccgatcaagacacaagtcccactgacggaaattgataagaatctgctggacgtattggcctgttatgttactttaaaccgcgtgaacaacgtgatctctaagattggaacagtgacgccggccgattttgagaaagtaatgtggctgactgttcaggatattctggaagaaacgtcacgtgagggtattgttctgacgacatcggacaatcctgacctcgtcaagaaagaacttgtccgcatggtgcaggatgtgttaaaatcgggctggcgcgaactggtgtcg

SEQ ID NO: 788 - protein, 343 aa, synthetic construct
  REGION 1..343: note = variant of RNA ligase 2 from Escherichia phage RB69 (Bacteriophage RB69)
MHHHHHHGGSGMFKKYSSLENHYNSKFIEKLYANGLTDGVWVAREKIHGTNFSLIIERDNVTCAKRTGPIKPTETFYGYEIVLKKYDKAIKTVQKSMYTAGAVSYQVFGEFAGNGIWKGVDYGEKDFYVFDILINAESGDNTYLTDYEMQDFCNECGFKMAPMLGRGTFDSLIMIPNDFDSVLMAYNATAKEDLVKANNCVFDANVIGDNTAEGYVLKPCEPKWLPNGTRVAIKCKNSKFSEKKKSDKPIKTQVPLTEIDKNLLDVLACYVTLNRVNNVISKIGTVTPADFEKVMWLTVQDILEETSREGIVLTTSDNPDLVKKELVRMVQDVLKSGWRELVS

SEQ ID NO: 789 - DNA, 1029 bp, synthetic construct
  misc_feature 1..1029: note = variant of RNA ligase 2 from Escherichia phage RB69 (Bacteriophage RB69)
  source 1..1029: mol_type = other DNA
atgcatcaccatcaccatcacggtggcagcggtatgtttaagaaatattctagtctggaaaaccattacaatagcaaattcattgagaaactctatgctaacggcttaactgatggtgtatgggttgcgcgcgaaaagatccacgggacgaacttttcgctgattatcgagcgtgataatgtaacatgcgccaaacgtacaggcccgattaagcctaccgaaaccttctacggttatgaaatcgtcctgaagaaatacgataaagcgattaagacggtgcagaaatctatgtataccgccggcgccgtttcctaccaagtgttcggagaatttgctggcaacggtatctggaaaggggtcgattatggcgagaaagacttctatgtgtttgatattctgatcaatgcggaatcaggagacaacacgtacctgactgattatgaaatgcaggacttctgtaatgaatgtgggtttaagatggcaccaatgcttggtcgcggcacattcgatagcctgattatgattccgaacgatttcgattcggttctcatggcttacaatgcaaccgcgaaagaggacctggtaaaagcgaacaactgcgtctttgatgccaatgtgatcggtgataacactgctgaaggctatgttcttaaaccgtgtgaacccaaatggttaccgaatgggacgcgtgtggcgatcaaatgcaagaactccaaattcagcgagaagaagaaaagtgacaaaccgatcaagacacaagtcccactgacggaaattgataagaatctgctggacgtattggcctgttatgtcactttaaaccgcgtgaacaacgtgatctctaagattggaacagtgacgccgcatgattttgagaaagtaatgtggctgactgttcaggatattctggaagaaacgtcacgtgagggtattgttctgacgacatcggacaatcctgacctcgtcaagaaagaacttgtccgcatggtgcaggatgtgttaaaatcgggctggcgcgaactggtgtcg

SEQ ID NO: 790 - protein, 343 aa, synthetic construct
  REGION 1..343: note = variant of RNA ligase 2 from Escherichia phage RB69 (Bacteriophage RB69)
MHHHHHHGGSGMFKKYSSLENHYNSKFIEKLYANGLTDGVWVAREKIHGTNFSLIIERDNVTCAKRTGPIKPTETFYGYEIVLKKYDKAIKTVQKSMYTAGAVSYQVFGEFAGNGIWKGVDYGEKDFYVFDILINAESGDNTYLTDYEMQDFCNECGFKMAPMLGRGTFDSLIMIPNDFDSVLMAYNATAKEDLVKANNCVFDANVIGDNTAEGYVLKPCEPKWLPNGTRVAIKCKNSKFSEKKKSDKPIKTQVPLTEIDKNLLDVLACYVTLNRVNNVISKIGTVTPHDFEKVMWLTVQDILEETSREGIVLTTSDNPDLVKKELVRMVQDVLKSGWRELVS

SEQ ID NO: 791 - DNA, 1029 bp, synthetic construct
  misc_feature 1..1029: note = variant of RNA ligase 2 from Escherichia phage RB69 (Bacteriophage RB69)
  source 1..1029: mol_type = other DNA
atgcatcaccatcaccatcacggtggcagcggtatgtttaagaaatattctagtctggaaaaccattacaatagcaaattcattgagaaactctatgctaacggcttaactgatggtgtatgggttgcgcgcgaaaagatccacgggacgaacttttcgctgattatcgagcgtgataatgtaacatgcgccaaacgtacaggcccgattaagcctaccgaaaccttctacggttatgaaatcgtcctgaagaaatacgataaagcgattaagacggtgcagaaatctatgtataccgccggcgccgtttcctaccaagtgttcggagaatttgctggcaacggtatctggaaaggggtcgattatggcgagaaagacttctatgtgtttgatattctgatcaatgcggaatcaggagacaacacgtacctgactgattatgaaatgcaggacttctgtaatgaatgtgggtttaagatggcaccaatgcttggtcgcggcgccttcgatagcctgattatgattccgaacgatttcgattcggttctcatggcttacaatgcaaccgcgaaagaggacctggtaaaagcgaacaactgcgtctttgatgccaatgtgatcggtgataacactgctgaaggctatgttcttaaaccgtgtgaacccaaatggttaccgaatgggacgcgtgtggcgatcaaatgcaagaactccaaattcagcgagaagaagaaaagtgacaaaccgatcaagacacaagtcccactgacggaaattgataagaatctgctggacgtattggcctgttatgtcactttaaaccgcgtgaacaacgtgatctctaagattggaacagtgacgccggccgattttgagaaagtaatgtggctgactgttcaggatattctggaagaaacgtcacgtgagggtattgttctgacgacatcggacaatcctgacctcgtcaagaaagaacttgtccgcatggtgcaggatgtgttaaaatcggcatggcgcgaactggtgtcg

SEQ ID NO: 792 - protein, 343 aa, synthetic construct
  REGION 1..343: note = variant of RNA ligase 2 from Escherichia phage RB69 (Bacteriophage RB69)
MHHHHHHGGSGMFKKYSSLENHYNSKFIEKLYANGLTDGVWVAREKIHGTNFSLIIERDNVTCAKRTGPIKPTETFYGYEIVLKKYDKAIKTVQKSMYTAGAVSYQVFGEFAGNGIWKGVDYGEKDFYVFDILINAESGDNTYLTDYEMQDFCNECGFKMAPMLGRGAFDSLIMIPNDFDSVLMAYNATAKEDLVKANNCVFDANVIGDNTAEGYVLKPCEPKWLPNGTRVAIKCKNSKFSEKKKSDKPIKTQVPLTEIDKNLLDVLACYVTLNRVNNVISKIGTVTPADFEKVMWLTVQDILEETSREGIVLTTSDNPDLVKKELVRMVQDVLKSAWRELVS

SEQ ID NO: 793 - DNA, 1029 bp, synthetic construct
  misc_feature 1..1029: note = variant of RNA ligase 2 from Escherichia phage RB69 (Bacteriophage RB69)
  source 1..1029: mol_type = other DNA
atgcatcaccatcaccatcacggtggcagcggtatgtttaagaaatattctagtctggaaaaccattacaatagcaaattcattgagaaactctatgctaacggcttaactgatggtgtatgggttgcgcgcgaaaagatccacgggacgaacttttcgctgattatcgagcgtgataatgtaacatgcgccaaacgtacaggcccgattaagcctaccgaaaccttctacggttatgaaatcgtcctgaagaaatacgataaagcgattaagacggtgcaggtgtctatgtataccgccggcgccgtttcctaccaagtgttcggagaatttgctggcaacggtatctggaaaggggtcgattatggcgagaaagacttctatgtgtttgatattctgatcaatgcggaatcaggagacaacacgtacctgactgattatgaaatgcaggacttctgtaatgaatttgggtttaagatggcaccaatgcttggtcgcggcacattcgatagcctgattatgattccgaacgatttcgattcggttctcatggcttacaatgcaaccgcgaaagaggacctggtaaaagcgaacaactgcgtctttgatgccaatgtgatcggtgataacactgctgaaggctatgttcttaaaccgtgtgaacccaaatggttaccgaatgggacgcgtgtggcgatcaaatgcaagaactccaaattcagcgagaagaagaaaagtgacaaaccgatcaagacacaagtcccactgacggaaattgataagaatctgctggacgtattggcctgttatgtcactttaaaccgcgtgaacaacgtgatctctaagattggaacagtgacgccgcatgattttgagaaagtaatgtggctgactgttgaagatattctggaagaaacgtcacgtgagggtattgttctgacgacatcggacaatcctgacctcgtcaagaaagaacttgtccgcatggtgcaggatgtgttaaaatcggcctggcgcgaactggtgtcg

SEQ ID NO: 794 - protein, 343 aa, synthetic construct
  REGION 1..343: note = variant of RNA ligase 2 from Escherichia phage RB69 (Bacteriophage RB69)
MHHHHHHGGSGMFKKYSSLENHYNSKFIEKLYANGLTDGVWVAREKIHGTNFSLIIERDNVTCAKRTGPIKPTETFYGYEIVLKKYDKAIKTVQVSMYTAGAVSYQVFGEFAGNGIWKGVDYGEKDFYVFDILINAESGDNTYLTDYEMQDFCNEFGFKMAPMLGRGTFDSLIMIPNDFDSVLMAYNATAKEDLVKANNCVFDANVIGDNTAEGYVLKPCEPKWLPNGTRVAIKCKNSKFSEKKKSDKPIKTQVPLTEIDKNLLDVLACYVTLNRVNNVISKIGTVTPHDFEKVMWLTVEDILEETSREGIVLTTSDNPDLVKKELVRMVQDVLKSAWRELVS

SEQ ID NO: 795 - DNA, 1029 bp, synthetic construct
  misc_feature 1..1029: note = variant of RNA ligase 2 from Escherichia phage RB69 (Bacteriophage RB69)
  source 1..1029: mol_type = other DNA
atgcatcaccatcaccatcacggtggcagcggtatgtttaagaaatattctagtctggaaaaccattacaatagcaaattcattgagaaactctatgctaacggcttaactgatggtgtatgggttgcgcgcgaaaagatccacgggacgaacttttcgctgattatcgagcgtgataatgtaacatgcgccaaacgtacaggcccgattaagcctaccgaaaccttctacggttatgaaatcgtcctgaagaaatacgataaagcgattaagacggtgcaggtgtctatgtataccgccggcgccgtttcctaccaagtgttcggagaatttgctggcaacggtatctggaaaggggtcgattatggcgagaaagacttctatgtgtttgatattctgatcaatgcggaatcaggagacaacacgtacctgactgattatgaaatgcaggacttctgtaatgaatatgggtttaagatggcaccaatgcttggtcgcggcaccttcgatagcctgattatgattccgaacgatttcgattcggttctcatggcttacaatgcaaccgcgaaagaggacctggtaaaagcgaacaactgcgtctttgatgccaatgtgatcggtgataacactgctgaaggctatgttcttaaaccgtgtgaacccaaatggttaccgaatgggacgcgtgtggcgatcaaatgcaagaactccaaattcagcgagaagaagaaaagtgacaaaccgatcaagacacaagtcccactgacggaaattgataagaatctgctggacgtattggcctgttatgtcactttaaaccgcgtgaacaacgtgatctctaagattggaacagtgacgccgaaagattttgagaaagtaatgtggctgactgttcaggatattctggaagaaacgtcacgtgagggtattgttctgacgacatcggacaatcctgacctcgtcaagaaagaacttgtccgcatggtgcaggatgtgttaaaatcggcctggcgcgaactggtgtcg

SEQ ID NO: 796 - protein, 343 aa, synthetic construct
  REGION 1..343: note = variant of RNA ligase 2 from Escherichia phage RB69 (Bacteriophage RB69)
MHHHHHHGGSGMFKKYSSLENHYNSKFIEKLYANGLTDGVWVAREKIHGTNFSLIIERDNVTCAKRTGPIKPTETFYGYEIVLKKYDKAIKTVQVSMYTAGAVSYQVFGEFAGNGIWKGVDYGEKDFYVFDILINAESGDNTYLTDYEMQDFCNEYGFKMAPMLGRGTFDSLIMIPNDFDSVLMAYNATAKEDLVKANNCVFDANVIGDNTAEGYVLKPCEPKWLPNGTRVAIKCKNSKFSEKKKSDKPIKTQVPLTEIDKNLLDVLACYVTLNRVNNVISKIGTVTPKDFEKVMWLTVQDILEETSREGIVLTTSDNPDLVKKELVRMVQDVLKSAWRELVS

SEQ ID NO: 797 - DNA, 1029 bp, synthetic construct
  misc_feature 1..1029: note = variant of RNA ligase 2 from Escherichia phage RB69 (Bacteriophage RB69)
  source 1..1029: mol_type = other DNA
atgcatcaccatcaccatcacggtggcagcggtatgtttaagaaatattctagtctggaaaaccattacaatagcaaattcattgagaaactctatgctaacggcttaactgatggtgtatgggttgcgcgcgaaaagatccacgggacgaacttttcgctgattatcgagcgtgataatgtaacatgcgccaaacgtacaggcccgattaagcctaccgaaaccttctacggttatgaaatcgtcctgaagaaatacgataaagcgattaagacggtgcaggtgtctatgtataccgccggcgccgtttcctaccaagtgttcggagaatttgctggcaacggtatctggaaaggggtcgattatggcgagaaagacttctatgtgtttgatattctgatcaatgcggaatcaggagacaacacgtacctgactgattatgaaatgcaggacttctgtaatgaatgtgggtttaagatggcaccaatgcttggtcgcggcaccttcgatagcctgattatgattccgaacgatttcgattcggttctcatggcttacaatgcagtggcgaaagaggacctggtaaaagcgaacaactgcgtctttgatgccaatgtgatcggtgataacactgctgaaggctatgttcttaaaccgtgtgaacccaaatggttaccgaatgggacgcgtgtggcgatcaaatgcaagaactccaaattcagcgagaagaagaaaagtgacaaaccgatcaagacacaagtcccactgacggaaattgataagaatctgctggacgtattggcctgttatattactttaaaccgcgtgaacaacgtgatctctaagattggaacagtgacgccgcatgattttgagaaagtaatgtggctgactgttcaggatattctggaagaaacgtcacgtgagggtattgttctgacgacatcggacaatcctgacctcgtcaagaaagaacttgtccgcatggtgcaggatgagttaaaatcgggctggcgcgaactggtgtcg

SEQ ID NO: 798 - protein, 343 aa, synthetic construct
  REGION 1..343: note = variant of RNA ligase 2 from Escherichia phage RB69 (Bacteriophage RB69)
MHHHHHHGGSGMFKKYSSLENHYNSKFIEKLYANGLTDGVWVAREKIHGTNFSLIIERDNVTCAKRTGPIKPTETFYGYEIVLKKYDKAIKTVQVSMYTAGAVSYQVFGEFAGNGIWKGVDYGEKDFYVFDILINAESGDNTYLTDYEMQDFCNECGFKMAPMLGRGTFDSLIMIPNDFDSVLMAYNAVAKEDLVKANNCVFDANVIGDNTAEGYVLKPCEPKWLPNGTRVAIKCKNSKFSEKKKSDKPIKTQVPLTEIDKNLLDVLACYITLNRVNNVISKIGTVTPHDFEKVMWLTVQDILEETSREGIVLTTSDNPDLVKKELVRMVQDELKSGWRELVS

SEQ ID NO: 799 - DNA, 1029 bp, synthetic construct
  misc_feature 1..1029: note = variant of RNA ligase 2 from Escherichia phage RB69 (Bacteriophage RB69)
  source 1..1029: mol_type = other DNA
atgcatcaccatcaccatcacggtggcagcggtatgtttaagaaatattctagtctggaaaaccattacaatagcaaattcattgagaaactctatgctaacggcttaactgatggtgtatgggttgcgcgcgaaaagatccacgggacgaacttttcgctgattatcgagcgtgataatgtaacatgcgccaaacgtacaggcccgattaagcctaccgaaaccttctacggttatgaaatcgtcctgaagaaatacgataaagcgattaagacggtgcaggtgtctatgtataccgccggcgccgtttcctaccaagtgttcggagaatttgctggcaacggtatctggaaaggggtcgattatggcgagaaagacttctatgtgtttgatattctgatcaatgcggaatcaggagacaacacgtacctgactgattatgaaatgcaggacttctgtaatgaatgtgggtttaagatggcaccaatgcttggtcgcggcgccttcgatagcctgattatgattccgaacgatttcgattcggttctcatggcttacaatgcaaccgcgaaagaggacctggtaaaagcgaacaactgcgtctttgatgccaatgtgatcggtgataacactgctgaaggctatgttcttaaaccgtgtgaacccaaatggttaccgaatgggacgcgtgtggcgatcaaatgcaagaactccaaattcagcgagaagaagaaaagtgacaaaccgatcaagacacaagtcccactgacggaaattgataagaatctgctggacgtattggcctgttatgttactttaaaccgcgtgaacaacgtgatctctaagattggaacagtgacgccgcatgattttgagaaagtaatgtggctgactgttgaagatattctggaagaaacgtcacgtgagggtattgttctgacgacatcggacaatcctgacctcgtcaagaaagaacttgtccgcatggtgcaggatgtgttaaaatcggcatggcgcgaactggtgtcg

SEQ ID NO: 800 - protein, 343 aa, synthetic construct
  REGION 1..343: note = variant of RNA ligase 2 from Escherichia phage RB69 (Bacteriophage RB69)
MHHHHHHGGSGMFKKYSSLENHYNSKFIEKLYANGLTDGVWVAREKIHGTNFSLIIERDNVTCAKRTGPIKPTETFYGYEIVLKKYDKAIKTVQVSMYTAGAVSYQVFGEFAGNGIWKGVDYGEKDFYVFDILINAESGDNTYLTDYEMQDFCNECGFKMAPMLGRGAFDSLIMIPNDFDSVLMAYNATAKEDLVKANNCVFDANVIGDNTAEGYVLKPCEPKWLPNGTRVAIKCKNSKFSEKKKSDKPIKTQVPLTEIDKNLLDVLACYVTLNRVNNVISKIGTVTPHDFEKVMWLTVEDILEETSREGIVLTTSDNPDLVKKELVRMVQDVLKSAWRELVS

SEQ ID NO: 801 - DNA, 1029 bp, synthetic construct
  misc_feature 1..1029: note = variant of RNA ligase 2 from Escherichia phage RB69 (Bacteriophage RB69)
  source 1..1029: mol_type = other DNA
atgcatcaccatcaccatcacggtggcagcggtatgtttaagaaatattctagtctggaaaaccattacaatagcaaattcattgagaaactctatgctaacggcttaactgatggtgtatgggttgcgcgcgaaaagatccacgggacgaacttttcgctgattatcgagcgtgataatgtaacatgcgccaaacgtacaggcccgattaagcctaccgaaaccttctacggttatgaaatcgtcctgaagaaatacgataaagcgattaagacggtgcaggtgtctatgtataccgccggcgccgtttcctaccaagtgttcggagaatttgctggcaacggtatctggaaaggggtcgattatggcgagaaagacttctatgtgtttgatattctgatcaatgcggaatcaggagacaacacgtacctgactgattatgaaatgcaggacttctgtaatgaatatgggtttaagatggcaccaatgcttggtcgcggcgccttcgatagcctgattatgattccgaacgatttcgattcggttctcatggcttacaatgcaaccgcgaaagaggacctggtaaaagcgaacaactgcgtctttgatgccaatgtgatcggtgataacactgctgaaggctatgttcttaaaccgtgtgaacccaaatggttaccgaatgggacgcgtgtggcgatcaaatgcaagaactccaaattcagcgagaagaagaaaagtgacaaaccgatcaagacacaagtcccactgacggaaattgataagaatctgctggacgtattggcctgttatattactttaaaccgcgtgaacaacgtgatctctaagattggaacagtgacgccgcatgattttgagaaagtaatgtggctgactgttcaagatattctggaagaaacgtcacgtgagggtattgttctgacgacatcggacaatcctgacctcgtcaagaaagaacttgtccgcatggtgcaggatgagttaaaatcgggctggcgcgaactggtgtcg

SEQ ID NO: 802 - protein, 343 aa, synthetic construct
  REGION 1..343: note = variant of RNA ligase 2 from Escherichia phage RB69 (Bacteriophage RB69)
MHHHHHHGGSGMFKKYSSLENHYNSKFIEKLYANGLTDGVWVAREKIHGTNFSLIIERDNVTCAKRTGPIKPTETFYGYEIVLKKYDKAIKTVQVSMYTAGAVSYQVFGEFAGNGIWKGVDYGEKDFYVFDILINAESGDNTYLTDYEMQDFCNEYGFKMAPMLGRGAFDSLIMIPNDFDSVLMAYNATAKEDLVKANNCVFDANVIGDNTAEGYVLKPCEPKWLPNGTRVAIKCKNSKFSEKKKSDKPIKTQVPLTEIDKNLLDVLACYITLNRVNNVISKIGTVTPHDFEKVMWLTVQDILEETSREGIVLTTSDNPDLVKKELVRMVQDELKSGWRELVS

SEQ ID NO: 803 - DNA, 1029 bp, synthetic construct
  misc_feature 1..1029: note = variant of RNA ligase 2 from Escherichia phage RB69 (Bacteriophage RB69)
  source 1..1029: mol_type = other DNA
atgcatcaccatcaccatcacggtggcagcggtatgtttaagaaatattctagtctggaaaaccattacaatagcaaattcattgagaaactctatgctaacggcttaactgatggtgtatgggttgcgcgcgaaaagatccacgggacgaacttttcgctgattatcgagcgtgataatgtaacatgcgccaaacgtacaggcccgattaagcctaccgaaaccttctacggttatgaaatcgtcctgaagaaatacgataaagcgattaagacggtgcaggtgtctatgtataccgccggcgccgtttcctaccaagtgttcggagaatttgctggcaacggtatctggaaaggggtcgattatggcgagaaagacttctatgtgtttgatattctgatcaatgcggaatcaggagacaacacgtacctgactgattatgaaatgcaggacttctgtaatgaatgtgggtttaagatggcaccaatgcttggtcgcggcacattcgatagcctgattatgattccgaacgatttcgattcggttctcatggcttacaatgcagtggcgaaagaggacctggtaaaagcgaacaactgcgtctttgatgccaatgtgatcggtgataacactgctgaaggctatgttcttaaaccgtgtgaacccaaatggttaccgaatgggacgcgtgtggcgatcaaatgcaagaactccaaattcagcgagaagaagaaaagtgacaaaccgatcaagacacaagtcccactgacggaaattgataagaatctgctggacgtattggcctgttatgtcactttaaaccgcgtgaacaacgtgatctctaagattggaacagtgacgccggccgattttgagaaagtaatgtggctgactgttcaagatattctggaagaaacgtcacgtgagggtattgttctgacgacatcggacaatcctgacctcgtcaagaaagaacttgtccgcatggtgcaggatgagttaaaatcgggctggcgcgaactggtgtcg

SEQ ID NO: 804 - protein, 343 aa, synthetic construct
  REGION 1..343: note = variant of RNA ligase 2 from Escherichia phage RB69 (Bacteriophage RB69)
MHHHHHHGGSGMFKKYSSLENHYNSKFIEKLYANGLTDGVWVAREKIHGTNFSLIIERDNVTCAKRTGPIKPTETFYGYEIVLKKYDKAIKTVQVSMYTAGAVSYQVFGEFAGNGIWKGVDYGEKDFYVFDILINAESGDNTYLTDYEMQDFCNECGFKMAPMLGRGTFDSLIMIPNDFDSVLMAYNAVAKEDLVKANNCVFDANVIGDNTAEGYVLKPCEPKWLPNGTRVAIKCKNSKFSEKKKSDKPIKTQVPLTEIDKNLLDVLACYVTLNRVNNVISKIGTVTPADFEKVMWLTVQDILEETSREGIVLTTSDNPDLVKKELVRMVQDELKSGWRELVS

SEQ ID NO: 805 - DNA, 1029 bp, synthetic construct
  misc_feature 1..1029: note = variant of RNA ligase 2 from Escherichia phage RB69 (Bacteriophage RB69)
  source 1..1029: mol_type = other DNA
atgcatcaccatcaccatcacggtggcagcggtatgtttaagaaatattctagtctggaaaaccattacaatagcaaattcattgagaaactctatgctaacggcttaactgatggtgtatgggttgcgcgcgaaaagatccacgggacgaacttttcgctgattatcgagcgtgataatgtaacatgcgccaaacgtacaggcccgattaagcctaccgaaaccttctacggttatgaaatcgtcctgaagaaatacgataaagcgattaagacggtgcagaaatctatgtataccgccggcgccgtttcctaccaagtgttcggagaatttgctggcaacggtatctggaaaggggtcgattatggcgagaaagacttctatgtgtttgatattctgatcaatgcggaatcaggagacaacacgtacctgactgattatgaaatgcaggacttctgtaatgaatttgggtttaagatggcaccaatgcttggtcgcggcgccttcgatagcctgattatgattccgaacgatttcgattcggttctcatggcttacaatgcaaccgcgaaagaggacctggtaaaagcgaacaacagcgtctttgatgccaatgtgatcggtgataacactgctgaaggctatgttcttaaaccgtgtgaacccaaatggttaccgaatgggacgcgtgtggcgatcaaatgcaagaactccaaattcagcgagaagaagaaaagtgacaaaccgatcaagacacaagtcccactgacggaaattgataagaatctgctggacgtattggcctgttatgttactttaaaccgcgtgaacaacgtgatctctaagattggaacagtgacgccggccgattttgagaaagtaatgtggctgactgttcaagatattctggaagaaacgtcacgtgagggtattgttctgacgacatcggacaatcctgacctcgtcaagaaagaacttgtccgcatggtgcaggatgtgtcaaaatcggcctggcgcgaactggtgtcg

SEQ ID NO: 806 - protein, 343 aa, synthetic construct
  REGION 1..343: note = variant of RNA ligase 2 from Escherichia phage RB69 (Bacteriophage RB69)
MHHHHHHGGSGMFKKYSSLENHYNSKFIEKLYANGLTDGVWVAREKIHGTNFSLIIERDNVTCAKRTGPIKPTETFYGYEIVLKKYDKAIKTVQKSMYTAGAVSYQVFGEFAGNGIWKGVDYGEKDFYVFDILINAESGDNTYLTDYEMQDFCNEFGFKMAPMLGRGAFDSLIMIPNDFDSVLMAYNATAKEDLVKANNSVFDANVIGDNTAEGYVLKPCEPKWLPNGTRVAIKCKNSKFSEKKKSDKPIKTQVPLTEIDKNLLDVLACYVTLNRVNNVISKIGTVTPADFEKVMWLTVQDILEETSREGIVLTTSDNPDLVKKELVRMVQDVSKSAWRELVS

SEQ ID NO: 807 - DNA, 1029 bp, synthetic construct
  misc_feature 1..1029: note = variant of RNA ligase 2 from Escherichia phage RB69 (Bacteriophage RB69)
  source 1..1029: mol_type = other DNA
atgcatcaccatcaccatcacggtggcagcggtatgtttaagaaatattctagtctggaaaaccattacaatagcaaattcattgagaaactctatgctaacggcttaactgatggtgtatgggttgcgcgcgaaaagatccacgggacgaacttttcgctgattatcgagcgtgataatgtaacatgcgccaaacgtacaggcccgattaagcctaccgaaaccttctacggttatgaaatcgtcctgaagaaatacgataaagcgattaagacggtgcaggtgtctatgtataccgccggcgccgtttcctaccaagtgttcggagaatttgctggcaacggtatctggaaaggggtcgattatggcgagaaagacttctatgtgtttgatattctgatcaatgcggaatcaggagacaacacgtacctgactgattatgaaatgcaggacttctgtaatgaatttgggtttaagatggcaccaatgcttggtcgcggcgccttcgatagcctgattatgattccgaacgatttcgattcggttctcatggcttacaatgcagtggcgaaagaggacctggtaaaagcgaacaactgcgtctttgatgccaatgtgatcggtgataacactgctgaaggctatgttcttaaaccgtgtgaacccaaatggttaccgaatgggacgcgtgtggcgatcaaatgcaagaactccaaattcagcgagaagaagaaaagtgacaaaccgatcaagacacaagtcccactgacggaaattgataagaatctgctggacgtattggcctgttatattactttaaaccgcgtgaacaacgtgatctctaagattggaacagtgacgccgaccgattttgagaaagtaatgtggctgactgttcaggatattctggaagaaacgtcacgtgagggtattgttctgacgacatcggacaatcctgacctcgtcaagaaagaacttgtccgcatggtgcaggatgtgttaaaatcggcatggcgcgaactggtgtcg

SEQ ID NO: 808 - protein, 343 aa, synthetic construct
  REGION 1..343: note = variant of RNA ligase 2 from Escherichia phage RB69 (Bacteriophage RB69)
MHHHHHHGGSGMFKKYSSLENHYNSKFIEKLYANGLTDGVWVAREKIHGTNFSLIIERDNVTCAKRTGPIKPTETFYGYEIVLKKYDKAIKTVQVSMYTAGAVSYQVFGEFAGNGIWKGVDYGEKDFYVFDILINAESGDNTYLTDYEMQDFCNEFGFKMAPMLGRGAFDSLIMIPNDFDSVLMAYNAVAKEDLVKANNCVFDANVIGDNTAEGYVLKPCEPKWLPNGTRVAIKCKNSKFSEKKKSDKPIKTQVPLTEIDKNLLDVLACYITLNRVNNVISKIGTVTPTDFEKVMWLTVQDILEETSREGIVLTTSDNPDLVKKELVRMVQDVLKSAWRELVS

SEQ ID NO: 809 - DNA, 1029 bp, synthetic construct
  misc_feature 1..1029: note = variant of RNA ligase 2 from Escherichia phage RB69 (Bacteriophage RB69)
  source 1..1029: mol_type = other DNA
atgcatcaccatcaccatcacggtggcagcggtatgtttaagaaatattctagtctggaaaaccattacaatagcaaattcattgagaaactctatgctaacggcttaactgatggtgtatgggttgcgcgcgaaaagatccacgggacgaacttttcgctgattatcgagcgtgataatgtaacatgcgccaaacgtacaggcccgattaagcctaccgaaaccttctacggttatgaaatcgtcctgaagaaatacgataaagcgattaagacggtgcagaaatctatgtataccgccggcgccgtttcctaccaagtgttcggagaatttgctggcaacggtatctggaaaggggtcgattatggcgagaaagacttctatgtgtttgatattctgatcaatgcggaatcaggagacaacacgtacctgactgattatgaaatgcaggacttctgtaatgaatatgggtttaagatggcaccaatgcttggtcgcggcaccttcgatagcctgattatgattccgaacgatttcgattcggttctcatggcttacaatgcagtggcgaaagaggacctggtaaaagcgaacaacaccgtctttgatgccaatgtgatcggtgataacactgctgaaggctatgttcttaaaccgtgtgaacccaaatggttaccgaatgggacgcgtgtggcgatcaaatgcaagaactccaaattcagcgagaagaagaaaagtgacaaaccgatcaagacacaagtcccactgacggaaattgataagaatctgctggacgtattggcctgttatgttactttaaaccgcgtgaacaacgtgatctctaagattggaacagtgacgccgaccgattttgagaaagtaatgtggctgactgttcaggatattctggaagaaacgtcacgtgagggtattgttctgacgacatcggacaatcctgacctcgtcaagaaagaacttgtccgcatggtgcaggatgtgttaaaatcgggctggcgcgaactggtgtcg

SEQ ID NO: 810 - protein, 343 aa, synthetic construct
  REGION 1..343: note = variant of RNA ligase 2 from Escherichia phage RB69 (Bacteriophage RB69)
MHHHHHHGGSGMFKKYSSLENHYNSKFIEKLYANGLTDGVWVAREKIHGTNFSLIIERDNVTCAKRTGPIKPTETFYGYEIVLKKYDKAIKTVQKSMYTAGAVSYQVFGEFAGNGIWKGVDYGEKDFYVFDILINAESGDNTYLTDYEMQDFCNEYGFKMAPMLGRGTFDSLIMIPNDFDSVLMAYNAVAKEDLVKANNTVFDANVIGDNTAEGYVLKPCEPKWLPNGTRVAIKCKNSKFSEKKKSDKPIKTQVPLTEIDKNLLDVLACYVTLNRVNNVISKIGTVTPTDFEKVMWLTVQDILEETSREGIVLTTSDNPDLVKKELVRMVQDVLKSGWRELVS

SEQ ID NO: 811 - DNA, 1029 bp, synthetic construct
  misc_feature 1..1029: note = variant of RNA ligase 2 from Escherichia phage RB69 (Bacteriophage RB69)
  source 1..1029: mol_type = other DNA
atgcatcaccatcaccatcacggtggcagcggtatgtttaagaaatattctagtctggaaaaccattacaatagcaaattcattgagaaactctatgctaacggcttaactgatggtgtatgggttgcgcgcgaaaagatccacgggacgaacttttcgctgattatcgagcgtgataatgtaacatgcgccaaacgtacaggcccgattaagcctaccgaaaccttctacggttatgaaatcgtcctgaagaaatacgataaagcgattaagacggtgcagaaatctatgtataccgccggcgccgtttcctaccaagtgttcggagaatttgctggcaacggtatctggaaaggggtcgattatggcgagaaagacttctatgtgtttgatattctgatcaatgcggaatcaggagacaacacgtacctgactgattatgaaatgcaggacttctgtaatgaatttgggtttaagatggcaccaatgcttggtcgcggcacattcgatagcctgattatgattccgaacgatttcgattcggttctcatggcttacaatgcaacggcgaaagaggacctggtaaaagcgaacaactgcgtctttgatgccaatgtgatcggtgataacactgctgaaggctatgttcttaaaccgtgtgaacccaaatggttaccgaatgggacgcgtgtggcgatcaaatgcaagaactccaaattcagcgagaagaagaaaagtgacaaaccgatcaagacacaagtcccactgacggaaattgataagaatctgctggacgtattggcctgttatattactttaaaccgcgtgaacaacgtgatctctaagattggaacagtgacgccgcatgattttgagaaagtaatgtggctgactgttcaggatattctggaagaaacgtcacgtgagggtattgttctgacgacatcggacaatcctgacctcgtcaagaaagaacttgtccgcatggtgcaggatgtgttaaaatcggcctggcgcgaactggtgtcg

SEQ ID NO: 812 - protein, 343 aa, synthetic construct
  REGION 1..343: note = variant of RNA ligase 2 from Escherichia phage RB69 (Bacteriophage RB69)
MHHHHHHGGSGMFKKYSSLENHYNSKFIEKLYANGLTDGVWVAREKIHGTNFSLIIERDNVTCAKRTGPIKPTETFYGYEIVLKKYDKAIKTVQKSMYTAGAVSYQVFGEFAGNGIWKGVDYGEKDFYVFDILINAESGDNTYLTDYEMQDFCNEFGFKMAPMLGRGTFDSLIMIPNDFDSVLMAYNATAKEDLVKANNCVFDANVIGDNTAEGYVLKPCEPKWLPNGTRVAIKCKNSKFSEKKKSDKPIKTQVPLTEIDKNLLDVLACYITLNRVNNVISKIGTVTPHDFEKVMWLTVQDILEETSREGIVLTTSDNPDLVKKELVRMVQDVLKSAWRELVS

SEQ ID NO: 813 - DNA, 1029 bp, synthetic construct
  misc_feature 1..1029: note = variant of RNA ligase 2 from Escherichia phage RB69 (Bacteriophage RB69)
  source 1..1029: mol_type = other DNA
atgcatcaccatcaccatcacggtggcagcggtatgtttaagaaatattctagtctggaaaaccattacaatagcaaattcattgagaaactctatgctaacggcttaactgatggtgtatgggttgcgcgcgaaaagatccacgggacgaacttttcgctgattatcgagcgtgataatgtaacatgcgccaaacgtacaggcccgattaagcctaccgaaaccttctacggttatgaaatcgtcctgaagaaatacgataaagcgattaagacggtgcagaaatctatgtataccgccggcgccgtttcctaccaagtgttcggagaatttgctggcaacggtatctggaaaggggtcgattatggcgagaaagacttctatgtgtttgatattctgatcaatgcggaatcaggagacaacacgtacctgactgattatgaaatgcaggacttctgtaatgaatgtgggtttaagatggcaccaatgcttggtcgcggcaccttcgatagcctgattatgattccgaacgatttcgattcggttctcatggcttacaatgcaaccgcgaaagaggacctggtaaaagcgaacaactgcgtctttgatgccaatgtgatcggtgataacactgctgaaggctatgttcttaaaccgtgtgaacccaaatggttaccgaatgggacgcgtgtggcgatcaaatgcaagaactccaaattcagcgagaagaagaaaagtgacaaaccgatcaagacacaagtcccactgacggaaattgataagaatctgctggacgtattggcctgttatgtcactttaaaccgcgtgaacaacgtgatctctaagattggaacagtgacgccgaaagattttgagaaagtaatgtggctgactgttgaagatattctggaagaaacgtcacgtgagggtattgttctgacgacatcggacaatcctgacctcgtcaagaaagaacttgtccgcatggtgcaggatgagttaaaatcggcctggcgcgaactggtgtcg

SEQ ID NO: 814 - protein, 343 aa, synthetic construct
  REGION 1..343: note = variant of RNA ligase 2 from Escherichia phage RB69 (Bacteriophage RB69)
MHHHHHHGGSGMFKKYSSLENHYNSKFIEKLYANGLTDGVWVAREKIHGTNFSLIIERDNVTCAKRTGPIKPTETFYGYEIVLKKYDKAIKTVQKSMYTAGAVSYQVFGEFAGNGIWKGVDYGEKDFYVFDILINAESGDNTYLTDYEMQDFCNECGFKMAPMLGRGTFDSLIMIPNDFDSVLMAYNATAKEDLVKANNCVFDANVIGDNTAEGYVLKPCEPKWLPNGTRVAIKCKNSKFSEKKKSDKPIKTQVPLTEIDKNLLDVLACYVTLNRVNNVISKIGTVTPKDFEKVMWLTVEDILEETSREGIVLTTSDNPDLVKKELVRMVQDELKSAWRELVS

SEQ ID NO: 815 - DNA, 1029 bp, synthetic construct
  misc_feature 1..1029: note = variant of RNA ligase 2 from Escherichia phage RB69 (Bacteriophage RB69)
  source 1..1029: mol_type = other DNA
atgcatcaccatcaccatcacggtggcagcggtatgtttaagaaatattctagtctggaaaaccattacaatagcaaattcattgagaaactctatgctaacggcttaactgatggtgtatgggttgcgcgcgaaaagatccacgggacgaacttttcgctgattatcgagcgtgataatgtaacatgcgccaaacgtacaggcccgattaagcctaccgaaaccttctacggttatgaaatcgtcctgaagaaatacgataaagcgattaagacggtgcaggtgtctatgtataccgccggcgccgtttcctaccaagtgttcggagaatttgctggcaacggtatctggaaaggggtcgattatggcgagaaagacttctatgtgtttgatattctgatcaatgcggaatcaggagacaacacgtacctgactgattatgaaatgcaggacttctgtaatgaatatgggtttaagatggcaccaatgcttggtcgcggcacattcgatagcctgattatgattccgaacgatttcgattcggttctcatggcttacaatgcaaccgcgaaagaggacctggtaaaagcgaacaactgcgtctttgatgccaatgtgatcggtgataacactgctgaaggctatgttcttaaaccgtgtgaacccaaatggttaccgaatgggacgcgtgtggcgatcaaatgcaagaactccaaattcagcgagaagaagaaaagtgacaaaccgatcaagacacaagtcccactgacggaaattgataagaatctgctggacgtattggcctgttatattactttaaaccgcgtgaacaacgtgatctctaagattggaacagtgacgccgcatgattttgagaaagtaatgtggctgactgttcaggatattctggaagaaacgtcacgtgagggtattgttctgacgacatcggacaatcctgacctcgtcaagaaagaacttgtccgcatggtgcaggatgtgttaaaatcggcatggcgcgaactggtgtcg

SEQ ID NO: 816 - protein, 343 aa, synthetic construct
  REGION 1..343: note = variant of RNA ligase 2 from Escherichia phage RB69 (Bacteriophage RB69)
MHHHHHHGGSGMFKKYSSLENHYNSKFIEKLYANGLTDGVWVAREKIHGTNFSLIIERDNVTCAKRTGPIKPTETFYGYEIVLKKYDKAIKTVQVSMYTAGAVSYQVFGEFAGNGIWKGVDYGEKDFYVFDILINAESGDNTYLTDYEMQDFCNEYGFKMAPMLGRGTFDSLIMIPNDFDSVLMAYNATAKEDLVKANNCVFDANVIGDNTAEGYVLKPCEPKWLPNGTRVAIKCKNSKFSEKKKSDKPIKTQVPLTEIDKNLLDVLACYITLNRVNNVISKIGTVTPHDFEKVMWLTVQDILEETSREGIVLTTSDNPDLVKKELVRMVQDVLKSAWRELVS

SEQ ID NO: 817 - DNA, 1029 bp, synthetic construct
  misc_feature 1..1029: note = variant of RNA ligase 2 from Escherichia phage RB69 (Bacteriophage RB69)
  source 1..1029: mol_type = other DNA
atgcatcaccatcaccatcacggtggcagcggtatgtttaagaaatattctagtctggaaaaccattacaatagcaaattcattgagaaactctatgctaacggcttaactgatggtgtatgggttgcgcgcgaaaagatccacgggacgaacttttcgctgattatcgagcgtgataatgtaacatgcgccaaacgtacaggcccgattaagcctaccgaaaccttctacggttatgaaatcgtcctgaagaaatacgataaagcgattaagacggtgcagaaatctatgtataccgccggcgccgtttcctaccaagtgttcggagaatttgctggcaacggtatctggaaaggggtcgattatggcgagaaagacttctatgtgtttgatattctgatcaatgcggaatcaggagacaacacgtacctgactgattatgaaatgcaggacttctgtaatgaatgtgggtttaagatggcaccaatgcttggtcgcggcacattcgatagcctgattatgattccgaacgatttcgattcggttctcatggcttacaatgcaaccgcgaaagaggacctggtaaaagcgaacaacagcgtctttgatgccaatgtgatcggtgataacactgctgaaggctatgttcttaaaccgtgtgaacccaaatggttaccgaatgggacgcgtgtggcgatcaaatgcaagaactccaaattcagcgagaagaagaaaagtgacaaaccgatcaagacacaagtcccactgacggaaattgataagaatctgctggacgtattggcctgttatgtcactttaaaccgcgtgaacaacgtgatctctaagattggaacagtgacgccggccgattttgagaaagtaatgtggctgactgttcaagatattctggaagaaacgtcacgtgagggtattgttctgacgacatcggacaatcctgacctcgtcaagaaagaacttgtccgcatggtgcaggatgtgttaaaatcggcatggcgcgaactggtgtcg

SEQ ID NO: 818 - protein, 343 aa, synthetic construct
  REGION 1..343: note = variant of RNA ligase 2 from Escherichia phage RB69 (Bacteriophage RB69)
MHHHHHHGGSGMFKKYSSLENHYNSKFIEKLYANGLTDGVWVAREKIHGTNFSLIIERDNVTCAKRTGPIKPTETFYGYEIVLKKYDKAIKTVQKSMYTAGAVSYQVFGEFAGNGIWKGVDYGEKDFYVFDILINAESGDNTYLTDYEMQDFCNECGFKMAPMLGRGTFDSLIMIPNDFDSVLMAYNATAKEDLVKANNSVFDANVIGDNTAEGYVLKPCEPKWLPNGTRVAIKCKNSKFSEKKKSDKPIKTQVPLTEIDKNLLDVLACYVTLNRVNNVISKIGTVTPADFEKVMWLTVQDILEETSREGIVLTTSDNPDLVKKELVRMVQDVLKSAWRELVS

SEQ ID NO: 819 - DNA, 1029 bp, synthetic construct
  misc_feature 1..1029: note = variant of RNA ligase 2 from Escherichia phage RB69 (Bacteriophage RB69)
  source 1..1029: mol_type = other DNA
atgcatcaccatcaccatcacggtggcagcggtatgtttaagaaatattctagtctggaaaaccattacaatagcaaattcattgagaaactctatgctaacggcttaactgatggtgtatgggttgcgcgcgaaaagatccacgggacgaacttttcgctgattatcgagcgtgataatgtaacatgcgccaaacgtacaggcccgattaagcctaccgaaaccttctacggttatgaaatcgtcctgaagaaatacgataaagcgattaagacggtgcagaaatctatgtataccgccggcgccgtttcctaccaagtgttcggagaatttgctggcaacggtatctggaaaggggtcgattatggcgagaaagacttctatgtgtttgatattctgatcaatgcggaatcaggagacaacacgtacctgactgattatgaaatgcaggacttctgtaatgaatgtgggtttaagatggcaccaatgcttggtcgcggcaccttcgatagcctgattatgattccgaacgatttcgattcggttctcatggcttacaatgcaacggcgaaagaggacctggtaaaagcgaacaacagcgtctttgatgccaatgtgatcggtgataacactgctgaaggctatgttcttaaaccgtgtgaacccaaatggttaccgaatgggacgcgtgtggcgatcaaatgcaagaactccaaattcagcgagaagaagaaaagtgacaaaccgatcaagacacaagtcccactgacggaaattgataagaatctgctggacgtattggcctgttatgtcactttaaaccgcgtgaacaacgtgatctctaagattggaacagtgacgccgaaagattttgagaaagtaatgtggctgactgttcaggatattctggaagaaacgtcacgtgagggtattgttctgacgacatcggacaatcctgacctcgtcaagaaagaacttgtccgcatggtgcaggatgagttaaaatcgggctggcgcgaactggtgtcg

SEQ ID NO: 820 - protein, 343 aa, synthetic construct
  REGION 1..343: note = variant of RNA ligase 2 from Escherichia phage RB69 (Bacteriophage RB69)
MHHHHHHGGSGMFKKYSSLENHYNSKFIEKLYANGLTDGVWVAREKIHGTNFSLIIERDNVTCAKRTGPIKPTETFYGYEIVLKKYDKAIKTVQKSMYTAGAVSYQVFGEFAGNGIWKGVDYGEKDFYVFDILINAESGDNTYLTDYEMQDFCNECGFKMAPMLGRGTFDSLIMIPNDFDSVLMAYNATAKEDLVKANNSVFDANVIGDNTAEGYVLKPCEPKWLPNGTRVAIKCKNSKFSEKKKSDKPIKTQVPLTEIDKNLLDVLACYVTLNRVNNVISKIGTVTPKDFEKVMWLTVQDILEETSREGIVLTTSDNPDLVKKELVRMVQDELKSGWRELVS

SEQ ID NO: 821 - DNA, 1029 bp, synthetic construct
  misc_feature 1..1029: note = variant of RNA ligase 2 from Escherichia phage RB69 (Bacteriophage RB69)
  source 1..1029: mol_type = other DNA
atgcatcaccatcaccatcacggtggcagcggtatgtttaagaaatattctagtctggaaaaccattacaatagcaaattcattgagaaactctatgctaacggcttaactgatggtgtatgggttgcgcgcgaaaagatccacgggacgaacttttcgctgattatcgagcgtgataatgtaacatgcgccaaacgtacaggcccgattaagcctaccgaaaccttctacggttatgaaatcgtcctgaagaaatacgataaagcgattaagacggtgcaggtgtctatgtataccgccggcgccgtttcctaccaagtgttcggagaatttgctggcaacggtatctggaaaggggtcgattatggcgagaaagacttctatgtgtttgatattctgatcaatgcggaatcaggagacaacacgtacctgactgattatgaaatgcaggacttctgtaatgaatgtgggtttaagatggcaccaatgcttggtcgcggcgccttcgatagcctgattatgattccgaacgatttcgattcggttctcatggcttacaatgcagtggcgaaagaggacctggtaaaagcgaacaacaccgtctttgatgccaatgtgatcggtgataacactgctgaaggctatgttcttaaaccgtgtgaacccaaatggttaccgaatgggacgcgtgtggcgatcaaatgcaagaactccaaattcagcgagaagaagaaaagtgacaaaccgatcaagacacaagtcccactgacggaaattgataagaatctgctggacgtattggcctgttatgtcactttaaaccgcgtgaacaacgtgatctctaagattggaacagtgacgccggccgattttgagaaagtaatgtggctgactgttcaggatattctggaagaaacgtcacgtgagggtattgttctgacgacatcggacaatcctgacctcgtcaagaaagaacttgtccgcatggtgcaggatgtgttaaaatcggcctggcgcgaactggtgtcg

SEQ ID NO: 822 - protein, 343 aa, synthetic construct
  REGION 1..343: note = variant of RNA ligase 2 from Escherichia phage RB69 (Bacteriophage RB69)
MHHHHHHGGSGMFKKYSSLENHYNSKFIEKLYANGLTDGVWVAREKIHGTNFSLIIERDNVTCAKRTGPIKPTETFYGYEIVLKKYDKAIKTVQVSMYTAGAVSYQVFGEFAGNGIWKGVDYGEKDFYVFDILINAESGDNTYLTDYEMQDFCNECGFKMAPMLGRGAFDSLIMIPNDFDSVLMAYNAVAKEDLVKANNTVFDANVIGDNTAEGYVLKPCEPKWLPNGTRVAIKCKNSKFSEKKKSDKPIKTQVPLTEIDKNLLDVLACYVTLNRVNNVISKIGTVTPADFEKVMWLTVQDILEETSREGIVLTTSDNPDLVKKELVRMVQDVLKSAWRELVS

SEQ ID NO: 823 - DNA, 1029 bp, synthetic construct
  misc_feature 1..1029: note = variant of RNA ligase 2 from Escherichia phage RB69 (Bacteriophage RB69)
  source 1..1029: mol_type = other DNA
atgcatcaccatcaccatcacggtggcagcggtatgtttaagaaatattctagtctggaaaaccattacaatagcaaattcattgagaaactctatgctaacggcttaactgatggtgtatgggttgcgcgcgaaaagatccacgggacgaacttttcgctgattatcgagcgtgataatgtaacatgcgccaaacgtacaggcccgattaagcctaccgaaaccttctacggttatgaaatcgtcctgaagaaatacgataaagcgattaagacggtgcagaaatctatgtataccgccggcgccgtttcctaccaagtgttcggagaatttgctggcaacggtatctggaaaggggtcgattatggcgagaaagacttctatgtgtttgatattctgatcaatgcggaatcaggagacaacacgtacctgactgattatgaaatgcaggacttctgtaatgaatatgggtttaagatggcaccaatgcttggtcgcggcaccttcgatagcctgattatgattccgaacgatttcgattcggttctcatggcttacaatgcaaccgcgaaagaggacctggtaaaagcgaacaactgcgtctttgatgccaatgtgatcggtgataacactgctgaaggctatgttcttaaaccgtgtgaacccaaatggttaccgaatgggacgcgtgtggcgatcaaatgcaagaactccaaattcagcgagaagaagaaaagtgacaaaccgatcaagacacaagtcccactgacggaaattgataagaatctgctggacgtattggcctgttatattactttaaaccgcgtgaacaacgtgatctctaagattggaacagtgacgccgaccgattttgagaaagtaatgtggctgactgttcaggatattctggaagaaacgtcacgtgagggtattgttctgacgacatcggacaatcctgacctcgtcaagaaagaacttgtccgcatggtgcaggatgagttaaaatcggcctggcgcgaactggtgtcg

SEQ ID NO: 824 - protein, 343 aa, synthetic construct
  REGION 1..343: note = variant of RNA ligase 2 from Escherichia phage RB69 (Bacteriophage RB69)
MHHHHHHGGSGMFKKYSSLENHYNSKFIEKLYANGLTDGVWVAREKIHGTNFSLIIERDNVTCAKRTGPIKPTETFYGYEIVLKKYDKAIKTVQKSMYTAGAVSYQVFGEFAGNGIWKGVDYGEKDFYVFDILINAESGDNTYLTDYEMQDFCNEYGFKMAPMLGRGTFDSLIMIPNDFDSVLMAYNATAKEDLVKANNCVFDANVIGDNTAEGYVLKPCEPKWLPNGTRVAIKCKNSKFSEKKKSDKPIKTQVPLTEIDKNLLDVLACYITLNRVNNVISKIGTVTPTDFEKVMWLTVQDILEETSREGIVLTTSDNPDLVKKELVRMVQDELKSAWRELVS

SEQ ID NO: 825 - DNA, 1029 bp, synthetic construct
  misc_feature 1..1029: note = variant of RNA ligase 2 from Escherichia phage RB69 (Bacteriophage RB69)
  source 1..1029: mol_type = other DNA
atgcatcaccatcaccatcacggtggcagcggtatgtttaagaaatattctagtctggaaaaccattacaatagcaaattcattgagaaactctatgctaacggcttaactgatggtgtatgggttgcgcgcgaaaagatccacgggacgaacttttcgctgattatcgagcgtgataatgtaacatgcgccaaacgtacaggcccgattaagcctaccgaaaccttctacggttatgaaatcgtcctgaagaaatacgataaagcgattaagacggtgcagaaatctatgtataccgccggcgccgtttcctaccaagtgttcggagaatttgctggcaacggtatctggaaaggggtcgattatggcgagaaagacttctatgtgtttgatattctgatcaatgcggaatcaggagacaacacgtacctgactgattatgaaatgcaggacttctgtaatgaatgtgggtttaagatggcaccaatgcttggtcgcggcgccttcgatagcctgattatgattccgaacgatttcgattcggttctcatggcttacaatgcaaccgcgaaagaggacctggtaaaagcgaacaacagcgtctttgatgccaatgtgatcggtgataacactgctgaaggctatgttcttaaaccgtgtgaacccaaatggttaccgaatgggacgcgtgtggcgatcaaatgcaagaactccaaattcagcgagaagaagaaaagtgacaaaccgatcaagacacaagtcccactgacggaaattgataagaatctgctggacgtattggcctgttatgttactttaaaccgcgtgaacaacgtgatctctaagattggaacagtgacgccgcatgattttgagaaagtaatgtggctgactgttcaggatattctggaagaaacgtcacgtgagggtattgttctgacgacatcggacaatcctgacctcgtcaagaaagaacttgtccgcatggtgcaggatgtgttaaaatcggcatggcgcgaactggtgtcg

SEQ ID NO: 826 - protein, 343 aa, synthetic construct
  REGION 1..343: note = variant of RNA ligase 2 from Escherichia phage RB69 (Bacteriophage RB69)
MHHHHHHGGSGMFKKYSSLENHYNSKFIEKLYANGLTDGVWVAREKIHGTNFSLIIERDNVTCAKRTGPIKPTETFYGYEIVLKKYDKAIKTVQKSMYTAGAVSYQVFGEFAGNGIWKGVDYGEKDFYVFDILINAESGDNTYLTDYEMQDFCNECGFKMAPMLGRGAFDSLIMIPNDFDSVLMAYNATAKEDLVKANNSVFDANVIGDNTAEGYVLKPCEPKWLPNGTRVAIKCKNSKFSEKKKSDKPIKTQVPLTEIDKNLLDVLACYVTLNRVNNVISKIGTVTPHDFEKVMWLTVQDILEETSREGIVLTTSDNPDLVKKELVRMVQDVLKSAWRELVS

SEQ ID NO: 827 - DNA, 1029 bp, synthetic construct
  misc_feature 1..1029: note = variant of RNA ligase 2 from Escherichia phage RB69 (Bacteriophage RB69)
  source 1..1029: mol_type = other DNA
atgcatcaccatcaccatcacggtggcagcggtatgtttaagaaatattctagtctggaaaaccattacaatagcaaattcattgagaaactctatgctaacggcttaactgatggtgtatgggttgcgcgcgaaaagatccacgggacgaacttttcgctgattatcgagcgtgataatgtaacatgcgccaaacgtacaggcccgattaagcctaccgaaaccttctacggttatgaaatcgtcctgaagaaatacgataaagcgattaagacggtgcagaaatctatgtataccgccggcgccgtttcctaccaagtgttcggagaatttgctggcaacggtatctggaaaggggtcgattatggcgagaaagacttctatgtgtttgatattctgatcaatgcggaatcaggagacaacacgtacctgactgattatgaaatgcaggacttctgtaatgaatttgggtttaagatggcaccaatgcttggtcgcggcgccttcgatagcctgattatgattccgaacgatttcgattcggttctcatggcttacaatgcaaccgcgaaagaggacctggtaaaagcgaacaactgcgtctttgatgccaatgtgatcggtgataacactgctgaaggctatgttcttaaaccgtgtgaacccaaatggttaccgaatgggacgcgtgtggcgatcaaatgcaagaactccaaattcagcgagaagaagaaaagtgacaaaccgatcaagacacaagtcccactgacggaaattgataagaatctgctggacgtattggcctgttatattactttaaaccgcgtgaacaacgtgatctctaagattggaacagtgacgccggccgattttgagaaagtaatgtggctgactgttcaggatattctggaagaaacgtcacgtgagggtattgttctgacgacatcggacaatcctgacctcgtcaagaaagaacttgtccgcatggtgcaggatgtgttaaaatcggcctggcgcgaactggtgtcg

SEQ ID NO: 828 - protein, 343 aa, synthetic construct
  REGION 1..343: note = variant of RNA ligase 2 from Escherichia phage RB69 (Bacteriophage RB69)
MHHHHHHGGSGMFKKYSSLENHYNSKFIEKLYANGLTDGVWVAREKIHGTNFSLIIERDNVTCAKRTGPIKPTETFYGYEIVLKKYDKAIKTVQKSMYTAGAVSYQVFGEFAGNGIWKGVDYGEKDFYVFDILINAESGDNTYLTDYEMQDFCNEFGFKMAPMLGRGAFDSLIMIPNDFDSVLMAYNATAKEDLVKANNCVFDANVIGDNTAEGYVLKPCEPKWLPNGTRVAIKCKNSKFSEKKKSDKPIKTQVPLTEIDKNLLDVLACYITLNRVNNVISKIGTVTPADFEKVMWLTVQDILEETSREGIVLTTSDNPDLVKKELVRMVQDVLKSAWRELVS

SEQ ID NO: 829 - DNA, 1029 bp, synthetic construct
  misc_feature 1..1029: note = variant of RNA ligase 2 from Escherichia phage RB69 (Bacteriophage RB69)
  source 1..1029: mol_type = other DNA
atgcatcaccatcaccatcacggtggcagcggtatgtttaagaaatattctagtctggaaaaccattacaatagcaaattcattgagaaactctatgctaacggcttaactgatggtgtatgggttgcgcgcgaaaagatccacgggacgaacttttcgctgattatcgagcgtgataatgtaacatgcgccaaacgtacaggcccgattaagcctaccgaaaccttctacggttatgaaatcgtcctgaagaaatacgataaagcgattaagacggtgcagaaatctatgtataccgccggcgccgtttcctaccaagtgttcggagaatttgctggcaacggtatctggaaaggggtcgattatggcgagaaagacttctatgtgtttgatattctgatcaatgcggaatcaggagacaacacgtacctgactgattatgaaatgcaggacttctgtaatgaatgtgggtttaagatggcaccaatgcttggtcgcggcacattcgatagcctgattatgattccgaacgatttcgattcggttctcatggcttacaatgcactggcgaaagaggacctggtaaaagcgaacaactgcgtctttgatgccaatcgcatcggtgataacactgctgaaggctatgttcttaaaccgtgtgaacccaaatggttaccgaatgggacgcgtgtggcgatcaaatgcaagaactccaaattcagcgagaagaagaaaagtgacaaaccgatcaagacacaagtcccactgacggaaattgataagaatctgctggacgtattggcctgttatgtcactttaaaccgcgtgaacaacgtgatctctaagattggaacagtgacgccgagcgattttgagaaagtaatgtggctgactgttcaggatattctggaagaaacgtcacgtgagggtattgttctgacgacatcggacaatcctgacctcgtcaagaaagaacttgtccgcatggtgcaggatgtgttaaaatcggcatggcgcgaactggtgtcg

SEQ ID NO: 830 - protein, 343 aa, synthetic construct
  REGION 1..343: note = variant of RNA ligase 2 from Escherichia phage RB69 (Bacteriophage RB69)
MHHHHHHGGSGMFKKYSSLENHYNSKFIEKLYANGLTDGVWVAREKIHGTNFSLIIERDNVTCAKRTGPIKPTETFYGYEIVLKKYDKAIKTVQKSMYTAGAVSYQVFGEFAGNGIWKGVDYGEKDFYVFDILINAESGDNTYLTDYEMQDFCNECGFKMAPMLGRGTFDSLIMIPNDFDSVLMAYNALAKEDLVKANNCVFDANRIGDNTAEGYVLKPCEPKWLPNGTRVAIKCKNSKFSEKKKSDKPIKTQVPLTEIDKNLLDVLACYVTLNRVNNVISKIGTVTPSDFEKVMWLTVQDILEETSREGIVLTTSDNPDLVKKELVRMVQDVLKSAWRELVS

SEQ ID NO: 831 - DNA, 1029 bp, synthetic construct
  misc_feature 1..1029: note = variant of RNA ligase 2 from Escherichia phage RB69 (Bacteriophage RB69)
  source 1..1029: mol_type = other DNA
atgcatcaccatcaccatcacggtggcagcggtatgtttaagaaatattctagtctggaaaaccattacaatagcaaattcattgagaaactctatgctaacggcttaactgatggtgtatgggttgcgcgcgaaaagatccacgggacgaacttttcgctgattatcgagcgtgataatgtaacatgcgccaaacgtacaggcccgattaagcctaccgaaaccttctacggttatgaaatcgtcctgaagaaatacgataaagcgattaagacggtgcagaaatctatgtataccgccggcgccgtttcctaccaagtgttcggagaatttgctggcaacggtatctggaaaggggtcgattatggcgagaaagacttctatgtgtttgatattctgatcaatgcggaatcaggagacaacacgtacctgactgattatgaaatgcaggacttctgtaatgaatttgggtttaagatggcaccaatgcttggtcgcggcacattcgatagcctgattatgattccgaacgatttcgattcggttctcatggcttacaatgcaaccgcgaaagaggacctggtaaaagcgaacaacagcgtctttgatgccaatgtgatcggtgataacactgctgaaggctatgttcttaaaccgtgtgaacccaaatggttaccgaatgggacgcgtgtggcgatcaaatgcaagaactccaaattcagcgagaagaagaaaagtgacaaaccgatcaagacacaagtcccactgacggaaattgataagaatctgctggacgtattggcctgttatgtcactttaaaccgcgtgaacaacgtgatctctaagattggaacagtgacgccgagcgattttgagaaagtaatgtggctgactgttcaggatattctggaagaaacgtcacgtgagggtattgttctgacgacatcggacaatcctgacctcgtcaagaaagaacttgtccgcatggtgcaggatgagttagaatcggcatggcgcgaactggtgtcg

SEQ ID NO: 832 - protein, 343 aa, synthetic construct
  REGION 1..343: note = variant of RNA ligase 2 from Escherichia phage RB69 (Bacteriophage RB69)
MHHHHHHGGSGMFKKYSSLENHYNSKFIEKLYANGLTDGVWVAREKIHGTNFSLIIERDNVTCAKRTGPIKPTETFYGYEIVLKKYDKAIKTVQKSMYTAGAVSYQVFGEFAGNGIWKGVDYGEKDFYVFDILINAESGDNTYLTDYEMQDFCNEFGFKMAPMLGRGTFDSLIMIPNDFDSVLMAYNATAKEDLVKANNSVFDANVIGDNTAEGYVLKPCEPKWLPNGTRVAIKCKNSKFSEKKKSDKPIKTQVPLTEIDKNLLDVLACYVTLNRVNNVISKIGTVTPSDFEKVMWLTVQDILEETSREGIVLTTSDNPDLVKKELVRMVQDELESAWRELVS

SEQ ID NO: 833 - DNA, 1029 bp, synthetic construct
  misc_feature 1..1029: note = variant of RNA ligase 2 from Escherichia phage RB69 (Bacteriophage RB69)
  source 1..1029: mol_type = other DNA
atgcatcaccatcaccatcacggtggcagcggtatgtttaagaaatattctagtctggaaaaccattacaatagcaaattcattgaaaaactctatgctaacggcttaactgatggtgtatgggttgcgcgcgaaaagatccacgggacgaacttttcgctgattatcgagcgtgataatgtaacatgcgccaaacgtacaggcccgattaagcctaccgaaaccttctacggttatgaaatcgtcctgaagaaatacgataaagcgattaagacggtgcagaaatctatgtataccgccggcgccgtttcctaccaagtgttcggagaatttgctggcaacggtatctggaaaggggtcgattatggcgagaaagacttctatgtgtttgatattctgatcaatgcggaatcaggagacaacacgtacctgactgattatgaaatgcaggacttctgtaatgaatttgggtttaagatggcaccaatgcttggtcgcggcacattcgatagcctgattatgattccgaacgatttcgattcggttctcatggcttacaatgcaaccgcgaaagaggacctggtaaaagcgaacaacagcgtctttgatgccaatgtgatcggtgataacactgctgaaggctatgttcttaaaccgtgtgaacccaaatggttaccgaatgggacgcgtgtggcgatcaaatgcaagaactccaaattcagcgagaagaagaaaagtgacaaaccgatcaagacacaagtcccactgacggaaattgataagaatctgctggacgtattggcctgttatgtcactttaaaccgcgtgaacaacgtgatctctaagattggaacagtgacgccgagcgattttgagaaagtaatgtggctgactgttcaggatattctggaagaaacgtcacgtgagggtattgttctgacgacatcggacaatcctgacctcgtcaagaaagaacttgtccgcatggtgcaggatgagttaaaatcggcatggcgcgaactggtgtcg

SEQ ID NO: 834 - protein, 343 aa, synthetic construct
  REGION 1..343: note = variant of RNA ligase 2 from Escherichia phage RB69 (Bacteriophage RB69)
MHHHHHHGGSGMFKKYSSLENHYNSKFIEKLYANGLTDGVWVAREKIHGTNFSLIIERDNVTCAKRTGPIKPTETFYGYEIVLKKYDKAIKTVQKSMYTAGAVSYQVFGEFAGNGIWKGVDYGEKDFYVFDILINAESGDNTYLTDYEMQDFCNEFGFKMAPMLGRGTFDSLIMIPNDFDSVLMAYNATAKEDLVKANNSVFDANVIGDNTAEGYVLKPCEPKWLPNGTRVAIKCKNSKFSEKKKSDKPIKTQVPLTEIDKNLLDVLACYVTLNRVNNVISKIGTVTPSDFEKVMWLTVQDILEETSREGIVLTTSDNPDLVKKELVRMVQDELKSAWRELVS

SEQ ID NO: 835 - DNA, 1029 bp, synthetic construct
  misc_feature 1..1029: note = variant of RNA ligase 2 from Escherichia phage RB69 (Bacteriophage RB69)
  source 1..1029: mol_type = other DNA
atgcatcaccatcaccatcacggtggcagcggtatgtttaagaaatattctagtctggaaaaccattacaatagcaaattcattgagaaactctatgctaacggcttaactgatggtgtatgggttgcgcgcgaaaagatccacgggacgaacttttcgctgattatcgagcgtgataatgtaacatgcgccaaacgtacaggcccgattaagcctaccgaaaccttctacggttatgaaatcgtcctgaagaaatacgataaagcgattaagacggtgcagaaatctatgtataccgccggcgccgtttcctaccaagtgttcggagaatttgctggcaacggtatctggaaaggggtcgattatggcgagaaagacttctatgtgtttgatattctgatcaatgcggaatcaggagacaacacgtacctgactgattatgaaatgcaggacttctgtaatgaatgtgggtttaagatggcaccaatgcttggtcgcggcacattcgatagcctgattatgattccgaacgatttcgattcggttctcatggcttacaatgcagtggcgaaagaggacctggtaaaagcgaacaacagcgtctttgatgccaatgtgatcggtgataacactgctgaaggctatgttcttaaaccgtgtgaacccaaatggttaccgaatgggacgcgtgtggcgatcaaatgcaagaactccaaattcagcgagaagaagaaaagtgacaaaccgatcaagacacaagtcccactgacggaaattgataagaatctgctggacgtattggcctgttatgtcactttaaaccgcgtgaacaacgtgatctctaagattggaacagtgacgccgaaagattttgagaaagtaatgtggctgactgttcaggatattctggaagaaacgtcacgtgagggtattgttctgacgacatcggacaatcctgacctcgtcaagaaagaacttgtccgcatggtgcaggatgagttaaaatcggcatggcgcgaactggtgtcg

SEQ ID NO: 836 - protein, 343 aa, synthetic construct
  REGION 1..343: note = variant of RNA ligase 2 from Escherichia phage RB69 (Bacteriophage RB69)
MHHHHHHGGSGMFKKYSSLENHYNSKFIEKLYANGLTDGVWVAREKIHGTNFSLIIERDNVTCAKRTGPIKPTETFYGYEIVLKKYDKAIKTVQKSMYTAGAVSYQVFGEFAGNGIWKGVDYGEKDFYVFDILINAESGDNTYLTDYEMQDFCNECGFKMAPMLGRGTFDSLIMIPNDFDSVLMAYNAVAKEDLVKANNSVFDANVIGDNTAEGYVLKPCEPKWLPNGTRVAIKCKNSKFSEKKKSDKPIKTQVPLTEIDKNLLDVLACYVTLNRVNNVISKIGTVTPKDFEKVMWLTVQDILEETSREGIVLTTSDNPDLVKKELVRMVQDELKSAWRELVS

SEQ ID NO: 837 - DNA, 1029 bp, synthetic construct
  misc_feature 1..1029: note = variant of RNA ligase 2 from Escherichia phage RB69 (Bacteriophage RB69)
  source 1..1029: mol_type = other DNA
atgcatcaccatcaccatcacggtggcagcggtatgtttaagaaatattctagtctggaaaaccattacaatagcaaattcattgagaaactctatgctaacggcttaactgatggtgtatgggttgcgcgcgaaaagatccacgggacgaacttttcgctgattatcgagcgtgataatgtaacatgcgccaaacgtacaggcccgattaagcctaccgaaaccttctacggttatgaaatcgtcctgaagaaatacgataaagcgattaagacggtgcagaaatctatgtataccgccggcgccgtttcctaccaagtgttcggagaatttgctggcaacggtatctggaaaggggtcgattatggcgagaaagacttctatgtgtttgatattctgatcaatgcggaatcaggagacaacacgtacctgactgattatgaaatgcaggacttctgtaatgaatgtgggtttaagatggcaccaatgcttggtcgcggcacattcgatagcctgattatgattccgaacgatttcgattcggttctcatggcttacaatgcactggcgaaagaggacctggtaaaagcgaacaactgcgtctttgatgccaatgtgatcggtgataacactgctgaaggctatgttcttaaaccgtgtgaacccaaatggttaccgaatgggacgcgtgtggcgatcaaatgcaagaactccaaattcagcgagaagaagaaaagtgacaaaccgatcaagacacaagtcccactgacggaaattgataagaatctgctggacgtattggcctgttatgtcactttaaaccgcgtgaacaacgtgatctctaagattggaacagtgacgccgaaagattttgagaaagtaatgtggctgactgttcaggatattctggaagaaacgtcacgtgagggtattgttctgacgacatcggacaatcctgacctcgtcaagaaagaacttgtccgcatggtgcaggatgtgttagaatcggcatggcgcgaactggtgtcg

SEQ ID NO: 838 - protein, 343 aa, synthetic construct
  REGION 1..343: note = variant of RNA ligase 2 from Escherichia phage RB69 (Bacteriophage RB69)
MHHHHHHGGSGMFKKYSSLENHYNSKFIEKLYANGLTDGVWVAREKIHGTNFSLIIERDNVTCAKRTGPIKPTETFYGYEIVLKKYDKAIKTVQKSMYTAGAVSYQVFGEFAGNGIWKGVDYGEKDFYVFDILINAESGDNTYLTDYEMQDFCNECGFKMAPMLGRGTFDSLIMIPNDFDSVLMAYNALAKEDLVKANNCVFDANVIGDNTAEGYVLKPCEPKWLPNGTRVAIKCKNSKFSEKKKSDKPIKTQVPLTEIDKNLLDVLACYVTLNRVNNVISKIGTVTPKDFEKVMWLTVQDILEETSREGIVLTTSDNPDLVKKELVRMVQDVLESAWRELVS

SEQ ID NO: 839 - DNA, 1029 bp, synthetic construct
  misc_feature 1..1029: note = variant of RNA ligase 2 from Escherichia phage RB69 (Bacteriophage RB69)
  source 1..1029: mol_type = other DNA
atgcatcaccatcaccatcacggtggcagcggtatgtttaagaaatattctagtctggaaaaccattacaatagcaaattcattgaaaaactctatgctaacggcttaactgatggtgtatgggttgcgcgcgaaaagatccacgggacgaacttttcgctgattatcgagcgtgataatgtaacatgcgccaaacgtacaggcccgattaagcctaccgaaaccttctacggttatgaaatcgtcctgaagaaatacgataaagcgattaagacggtgcagaaatctatgtataccgccggcgccgtttcctaccaagtgttcggagaatttgctggcaacggtatctggaaaggggtcgattatggcgagaaagacttctatgtgtttgatattctgatcaatgcggaatcaggagacaacacgtacctgactgattatgaaatgcaggacttctgtaatgaatgtgggtttaagatggcaccaatgcttggtcgcggcacattcgatagcctgattatgattccgaacgatttcgattcggttctcatggcttacaatgcagtggcgaaagaggacctggtaaaagcgaacaactgcgtctttgatgccaatgtgatcggtgataacactgctgaaggctatgttcttaaaccgtgtgaacccaaatggttaccgaatgggacgcgtgtggcgatcaaatgcaagaactccaaattcagcgagaagaagaaaagtgacaaaccgatcaagacacaaggcccactgacggaaattgataagaatctgctggacgtattggcctgttatgtcactttaaaccgcgtgaacaacgtgatctctaagattggaacagtgacgccgagcgattttgagaaagtaatgtggctgactgttcaggatattctggaagaaacgtcacgtgagggtattgttctgacgacatcggacaatcctgacctcgtcaagaaagaacttgtccgcatggtgcaggatgagttaaaatcggcatggcgcgaactggtgtcg

SEQ ID NO: 840 - protein, 343 aa, synthetic construct
  REGION 1..343: note = variant of RNA ligase 2 from Escherichia phage RB69 (Bacteriophage RB69)
MHHHHHHGGSGMFKKYSSLENHYNSKFIEKLYANGLTDGVWVAREKIHGTNFSLIIERDNVTCAKRTGPIKPTETFYGYEIVLKKYDKAIKTVQKSMYTAGAVSYQVFGEFAGNGIWKGVDYGEKDFYVFDILINAESGDNTYLTDYEMQDFCNECGFKMAPMLGRGTFDSLIMIPNDFDSVLMAYNAVAKEDLVKANNCVFDANVIGDNTAEGYVLKPCEPKWLPNGTRVAIKCKNSKFSEKKKSDKPIKTQGPLTEIDKNLLDVLACYVTLNRVNNVISKIGTVTPSDFEKVMWLTVQDILEETSREGIVLTTSDNPDLVKKELVRMVQDELKSAWRELVS

SEQ ID NO: 841 - DNA, 1029 bp, synthetic construct
  misc_feature 1..1029: note = variant of RNA ligase 2 from Escherichia phage RB69 (Bacteriophage RB69)
  source 1..1029: mol_type = other DNA
atgcatcaccatcaccatcacggtggcagcggtatgtttaagaaatattctagtctggaaaaccattacaatagcaaattcattgagaaactctatgctaacggcttaactgatggtgtatgggttgcgcgcgaaaagatccacgggacgaacttttcgctgattatcgagcgtgataatgtaacatgcgccaaacgtacaggcccgattaagcctaccgaaaccttctacggttatgaaatcgtcctgaagaaatacgataaagcgattaagacggtgcagaaatctatgtataccgccggcgccgtttcctaccaagtgttcggagaatttgctggcaacggtatctggaaaggggtcgattatggcgagaaagacttctatgtgtttgatattctgatcaatgcggaatcaggagacaacacgtacctgactgattatgaaatgcaggacttctgtaatgaatgtgggtttaagatggcaccaatgcttggtcgcggcacattcgatagcctgattatgattccgaacgatttcgattcggttctcatggcttacaatgcactggcgaaagaggacctggtaaaagcgaacaactgcgtctttgatgccaatgtgatcggtgataacactgctgaaggctatgttcttaaaccgtgtgaacccaaatggttaccgaatgggacgcgtgtggcgatcaaatgcaagaactccaaattcagcgagaagaagaaaagtgacaaaccgatcaagacacaagtcccactgacggaaattgataagaatctgctggacgtattggcctgttatgtcactttaaaccgcgtgaacaacgtgatctctaagattggaacagtgacgccgagcgattttgagaaagtaatgtggctgactgttcaggatattctggaagaaacgtcacgtgagggtattgttctgacgacatcggacaatcctgacctcgtcaagaaagaacttgtccgcatggtgcaggatgtgttaaaatcggcatggcgcgaactggtgtcg

SEQ ID NO: 842 - protein, 343 aa, synthetic construct
  REGION 1..343: note = variant of RNA ligase 2 from Escherichia phage RB69 (Bacteriophage RB69)
MHHHHHHGGSGMFKKYSSLENHYNSKFIEKLYANGLTDGVWVAREKIHGTNFSLIIERDNVTCAKRTGPIKPTETFYGYEIVLKKYDKAIKTVQKSMYTAGAVSYQVFGEFAGNGIWKGVDYGEKDFYVFDILINAESGDNTYLTDYEMQDFCNECGFKMAPMLGRGTFDSLIMIPNDFDSVLMAYNALAKEDLVKANNCVFDANVIGDNTAEGYVLKPCEPKWLPNGTRVAIKCKNSKFSEKKKSDKPIKTQVPLTEIDKNLLDVLACYVTLNRVNNVISKIGTVTPSDFEKVMWLTVQDILEETSREGIVLTTSDNPDLVKKELVRMVQDVLKSAWRELVS

SEQ ID NO: 843 - DNA, 1029 bp, synthetic construct
  misc_feature 1..1029: note = variant of RNA ligase 2 from Escherichia phage RB69 (Bacteriophage RB69)
  source 1..1029: mol_type = other DNA
atgcatcaccatcaccatcacggtggcagcggtatgtttaagaaatattctagtctggaaaaccattacaatagcaaattcattgagaaactctatgctaacggcttaactgatggtgtatgggttgcgcgcgaaaagatccacgggacgaacttttcgctgattatcgagcgtgataatgtaacatgcgccaaacgtacaggcccgattaagcctaccgaaaccttctacggttatgaaatcgtcctgaagaaatacgataaagcgattaagacggtgcagaaatctatgtataccgccggcgccgtttcctaccaagtgttcggagaatttgctggcaacggtatctggaaaggggtcgattatggcgagaaagacttctatgtgtttgatattctgatcaatgcggaatcaggagacaacacgtacctgactgattatgaaatgcaggacttctgtaatgaatgtgggtttaagatggcaccaatgcttggtcgcgccacattcgatagcctgattatgattccgaacgatttcgattcggttctcatggcttacaatgcactggcgaaagaggacctggtaaaagcgaacaactgcgtctttgatgccaatcgcatcggtgataacactgctgaaggctatgttcttaaaccgtgtgaacccaaatggttaccgaatgggacgcgtgtggcgatcaaatgcaagaactccaaattcagcgagaagaagaaaagtgacaaaccgatcaagacacaagtcccactgacggaaattgataagaatctgctggacgtattggcctgttatgtcactttaaaccgcgtgaacaacgtgatctctaagattggaacagtgacgccgagcgattttgagaaagtaatgtggctgactgttcaggatattctggaagaaacgtcacgtgagggtattgttctgacgacatcggacaatcctgacctcgtcaagaaagaacttgtccgcatggtgcaggatgagttagaatcggcatggcgcgaactggtgtcg

SEQ ID NO: 844 - protein, 343 aa, synthetic construct
  REGION 1..343: note = variant of RNA ligase 2 from Escherichia phage RB69 (Bacteriophage RB69)
MHHHHHHGGSGMFKKYSSLENHYNSKFIEKLYANGLTDGVWVAREKIHGTNFSLIIERDNVTCAKRTGPIKPTETFYGYEIVLKKYDKAIKTVQKSMYTAGAVSYQVFGEFAGNGIWKGVDYGEKDFYVFDILINAESGDNTYLTDYEMQDFCNECGFKMAPMLGRATFDSLIMIPNDFDSVLMAYNALAKEDLVKANNCVFDANRIGDNTAEGYVLKPCEPKWLPNGTRVAIKCKNSKFSEKKKSDKPIKTQVPLTEIDKNLLDVLACYVTLNRVNNVISKIGTVTPSDFEKVMWLTVQDILEETSREGIVLTTSDNPDLVKKELVRMVQDELESAWRELVS

SEQ ID NO: 845 - DNA, 1029 bp, synthetic construct
  misc_feature 1..1029: note = variant of RNA ligase 2 from Escherichia phage RB69 (Bacteriophage RB69)
  source 1..1029: mol_type = other DNA
atgcatcaccatcaccatcacggtggcagcggtatgtttaagaaatattctagtctggaaaaccattacaatagcaaattcattgagaaactctatgctaacggcttaactgatggtgtatgggttgcgcgcgaaaagatccacgggacgaacttttcgctgattatcgagcgtgataatgtaacatgcgccaaacgtacaggcccgattaagcctaccgaaaccttctacggttatgaaatcgtcctgaagaaatacgataaagcgattaagacggtgcagaaatctatgtataccgccggcgccgtttcctaccaagtgttcggagaatttgctggcaacggtatctggaaaggggtcgattatggcgagaaagacttctatgtgtttgatattctgatcaatgcggaatcaggagacaacacgtacctgactgattatgaaatgcaggacttctgtaatgaatttgggtttaagatggcaccaatgcttggtcgcggcacattcgatagcctgattatgattccgaacgatttcgattcggttctcatggcttacaatgcaaccgcgaaagaggacctggtaaaagcgaacaacagcgtctttgatgccaatgtgatcggtgataacactgctgaaggctatgttcttaaaccgtgtgaacccaaatggttaccgaatgggacgcgtgtggcgatcaaatgcaagaactccaaattcagcgagaagaagaaaagtgacaaaccgatcaagacacaagtcccactgacggaaattgataagaatctgctggacgtattggcctgttatgtcactttaaaccgcgtgaacaacgtgatctctaagattggaacagtgacgccgcatgattttgagaaagtaatgtggctgactgttcaggatattctggaagaaacgtcacgtgagggtattgttctgacgacatcggacaatcctgacctcgtcaagaaagaacttgtccgcatggtgcaggatgagttaaaatcggcatggcgcgaactggtgtcg

SEQ ID NO: 846 - protein, 343 aa, synthetic construct
  REGION 1..343: note = variant of RNA ligase 2 from Escherichia phage RB69 (Bacteriophage RB69)
MHHHHHHGGSGMFKKYSSLENHYNSKFIEKLYANGLTDGVWVAREKIHGTNFSLIIERDNVTCAKRTGPIKPTETFYGYEIVLKKYDKAIKTVQKSMYTAGAVSYQVFGEFAGNGIWKGVDYGEKDFYVFDILINAESGDNTYLTDYEMQDFCNEFGFKMAPMLGRGTFDSLIMIPNDFDSVLMAYNATAKEDLVKANNSVFDANVIGDNTAEGYVLKPCEPKWLPNGTRVAIKCKNSKFSEKKKSDKPIKTQVPLTEIDKNLLDVLACYVTLNRVNNVISKIGTVTPHDFEKVMWLTVQDILEETSREGIVLTTSDNPDLVKKELVRMVQDELKSAWRELVS

SEQ ID NO: 847 - DNA, 1029 bp, synthetic construct
  misc_feature 1..1029: note = variant of RNA ligase 2 from Escherichia phage RB69 (Bacteriophage RB69)
  source 1..1029: mol_type = other DNA
atgcatcaccatcaccatcacggtggcagcggtatgtttaagaaatattctagtctggaaaaccattacaatagcaaattcattgagaaactctatgctaacggcttaactgatggtgtatgggttgcgcgcgaaaagatccacgggacgaacttttcgctgattatcgagcgtgataatgtaacatgcgccaaacgtacaggcccgattaagcctaccgaaaccttctacggttatgaaatcgtcctgaagaaatacgataaagcgattaagacggtgcagaaatctatgtataccgccggcgccgtttcctaccaagtgttcggagaatttgctggcaacggtatctggaaaggggtcgattatggcgagaaagacttctatgtgtttgatattctgatcaatgcggaatcaggagacaacacgtacctgactgattatgaaatgcaggacttctgtaatgaatgtgggtttaagatggcaccaatgcttggtcgcggcacattcgatagcctgattatgattccgaacgatttcgattcggttctcatggcttacaatgcactggcgaaagaggacctggtaaaagcgaacaacagcgtctttgatgccaatgtgatcggtgataacactgctgaaggctatgttcttaaaccgtgtgaacccaaatggttaccgaatgggacgcgtgtggcgatcaaatgcaagaactccaaattcagcgagaagaagaaaagtgacaaaccgatcaagacacaagtcccactgacggaaattgataagaatctgctggacgtattggcctgttatgtcactttaaaccgcgtgaacaacgtgatctctaagattggaacagtgacgccgagcgattttgagaaagtaatgtggctgactgttcaggatattctggaagaaacgtcacgtgagggtattgttctgacgacatcggacaatcctgacctcgtcaagaaagaacttgtccgcatggtgcaggatgtgttaaaatcggcatggcgcgaactggtgtcg

SEQ ID NO: 848 - protein, 343 aa, synthetic construct
  REGION 1..343: note = variant of RNA ligase 2 from Escherichia phage RB69 (Bacteriophage RB69)
MHHHHHHGGSGMFKKYSSLENHYNSKFIEKLYANGLTDGVWVAREKIHGTNFSLIIERDNVTCAKRTGPIKPTETFYGYEIVLKKYDKAIKTVQKSMYTAGAVSYQVFGEFAGNGIWKGVDYGEKDFYVFDILINAESGDNTYLTDYEMQDFCNECGFKMAPMLGRGTFDSLIMIPNDFDSVLMAYNALAKEDLVKANNSVFDANVIGDNTAEGYVLKPCEPKWLPNGTRVAIKCKNSKFSEKKKSDKPIKTQVPLTEIDKNLLDVLACYVTLNRVNNVISKIGTVTPSDFEKVMWLTVQDILEETSREGIVLTTSDNPDLVKKELVRMVQDVLKSAWRELVS

SEQ ID NO: 849 - DNA, 1029 bp, synthetic construct
  misc_feature 1..1029: note = variant of RNA ligase 2 from Escherichia phage RB69 (Bacteriophage RB69)
  source 1..1029: mol_type = other DNA
atgcatcaccatcaccatcacggtggcagcggtatgtttaagaaatattctagtctggaaaaccattacaatagcaaattcattgaaaaactctatgctaacggcttaactgatggtgtatgggttgcgcgcgaaaagatccacgggacgaacttttcgctgattatcgagcgtgataatgtaacatgcgccaaacgtacaggcccgattaagcctaccgaaaccttctacggttatgaaatcgtcctgaagaaatacgataaagcgattaagacggtgcagaaatctatgtataccgccggcgccgtttcctaccaagtgttcggagaatttgctggcaacggtatctggaaaggggtcgattatggcgagaaagacttctatgtgtttgatattcttatcaatgcggaatcaggagacaacacgtacctgactgattatgaaatgcaggacttctgtaatgaatatgggtttaagatggcaccaatgcttggtcgcggcacattcgatagcctgattatgattccgaacgatttcgattcggttctcatggcttacaatgcaaccgcgaaagaggacctggtaaaagcgaacaacagcgtctttgatgccaatgtgatcggtgataacactgctgaaggctatgttcttaaaccgtgtgaacccaaatggttaccgaatgggacgcgtgtggcgatcaaatgcaagaactccaaattcagcgagaagaagaaaagtgacaaaccgatcaagacacaagtcccactgacggaaattgataagaatctgctggacgtattggcctgttatgtcactttaaaccgcgtgaacaacgtgatctctaagattggaacagtgacgccgaaagattttgagaaagtaatgtggctgactgttcaggatattctggaagaaacgtcacgtgagggtattgttctgacgacatcggacaatcctgacctcgtcaagaaagaacttgtccgcatggtgcaggatgtgttagaatcggcatggcgcgaactggtgtcg

SEQ ID NO: 850 - protein, 343 aa, synthetic construct
  REGION 1..343: note = variant of RNA ligase 2 from Escherichia phage RB69 (Bacteriophage RB69)
MHHHHHHGGSGMFKKYSSLENHYNSKFIEKLYANGLTDGVWVAREKIHGTNFSLIIERDNVTCAKRTGPIKPTETFYGYEIVLKKYDKAIKTVQKSMYTAGAVSYQVFGEFAGNGIWKGVDYGEKDFYVFDILINAESGDNTYLTDYEMQDFCNEYGFKMAPMLGRGTFDSLIMIPNDFDSVLMAYNATAKEDLVKANNSVFDANVIGDNTAEGYVLKPCEPKWLPNGTRVAIKCKNSKFSEKKKSDKPIKTQVPLTEIDKNLLDVLACYVTLNRVNNVISKIGTVTPKDFEKVMWLTVQDILEETSREGIVLTTSDNPDLVKKELVRMVQDVLESAWRELVS

SEQ ID NO: 851 - DNA, 1029 bp, synthetic construct
  misc_feature 1..1029: note = variant of RNA ligase 2 from Escherichia phage RB69 (Bacteriophage RB69)
  source 1..1029: mol_type = other DNA
atgcatcaccatcaccatcacggtggcagcggtatgtttaagaaatattctagtctggaaaaccattacaatagcaaattcattgagaaactctatgctaacggcttaactgatggtgtatgggttgcgcgcgaaaagatccacgggacgaacttttcgctgattatcgagcgtgataatgtaacatgcgccaaacgtacaggcccgattaagcctaccgaaaccttctacggttatgaaatcgtcctgaagaaatacgataaagcgattaagacggtgcagaaatctatgtataccgccggcgccgtttcctaccaagtgttcggagaatttgctggcaacggtatctggaaaggggtcgattatggcgagaaagacttctatgtgtttgatattctgatcaatgcggaatcaggagacaacacgtacctgactgattatgaaatgcaggacttctgtaatgaatttgggtttaagatggcaccaatgcttggtcgcggcacattcgatagcctgattatgattccgaacgatttcgattcggttctcatggcttacaatgcactggcgaaagaggacctggtaaaagcgaacaacagcgtctttgatgccaatgtgatcggtgataacactgctgaaggctatgttcttaaaccgtgtgaacccaaatggttaccgaatgggacgcgtgtggcgatcaaatgcaagaactccaaattcagcgagaagaagaaaagtgacaaaccgatcaagacacaagtcccactgacggaaattgataagaatctgctggacgtattggcctgttatgtcactttaaaccgcgtgaacaacgtgatctctaagattggaacagtgacgccgaaagattttgagaaagtaatgtggctgactgttcaggatattctggaagaaacgtcacgtgagggtattgttctgacgacatcggacaatcctgacctcgtcaagaaagaacttgtccgcatggtgcaggatgtgttaaaatcggcatggcgcgaactggtgtcg

SEQ ID NO: 852 - protein, 343 aa, synthetic construct
  REGION 1..343: note = variant of RNA ligase 2 from Escherichia phage RB69 (Bacteriophage RB69)
MHHHHHHGGSGMFKKYSSLENHYNSKFIEKLYANGLTDGVWVAREKIHGTNFSLIIERDNVTCAKRTGPIKPTETFYGYEIVLKKYDKAIKTVQKSMYTAGAVSYQVFGEFAGNGIWKGVDYGEKDFYVFDILINAESGDNTYLTDYEMQDFCNEFGFKMAPMLGRGTFDSLIMIPNDFDSVLMAYNALAKEDLVKANNSVFDANVIGDNTAEGYVLKPCEPKWLPNGTRVAIKCKNSKFSEKKKSDKPIKTQVPLTEIDKNLLDVLACYVTLNRVNNVISKIGTVTPKDFEKVMWLTVQDILEETSREGIVLTTSDNPDLVKKELVRMVQDVLKSAWRELVS

SEQ ID NO: 853 - DNA, 1029 bp, synthetic construct
  misc_feature 1..1029: note = variant of RNA ligase 2 from Escherichia phage RB69 (Bacteriophage RB69)
  source 1..1029: mol_type = other DNA
atgcatcaccatcaccatcacggtggcagcggtatgtttaagaaatattctagtctggaaaaccattacaatagcaaattcattgagaaactctatgctaacggcttaactgatggtgtatgggttgcgcgcgaaaagatccacgggacgaacttttcgctgattatcgagcgtgataatgtaacatgcgccaaacgtacaggcccgattaagcctaccgaaaccttctacggttatgaaatcgtcctgaagaaatacgataaagcgattaagacggtgcagaaatctatgtataccgccggcgccgtttcctaccaagtgttcggagaatttgctggcaacggtatctggaaaggggtcgattatggcgagaaagacttctatgtgtttgatattctgatcaatgcggaatcaggagacaacacgtacctgactgattatgaaatgcaggacttctgtaatgaatatgggtttaagatggcaccaatgcttggtcgcggcacattcgatagcctgattatgattccgaacgatttcgattcggttctcatggcttacaatgcactggcgaaagaggacctggtaaaagcgaacaactgcgtctttgatgccaatgtgatcggtgataacactgctgaaggctatgttcttaaaccgtgtgaacccaaatggttaccgaatgggacgcgtgtggcgatcaaatgcaagaactccaaattcagcgagaagaagaaaagtgacaaaccgatcaagacacaagtcccactgacggaaattgataagaatctgctggacgtattggcctgttatgtcactttaaaccgcgtgaacaacgtgatctctaagattggaacagtgacgccgaaagattttgagaaagtaatgtggctgactgttcaggatattctggaagaaacgtcacgtgagggtattgttctgacgacatcggacaatcctgacctcgtcaagaaagaacttgtccgcatggtgcaggatgtgttagaatcggcatggcgcgaactggtgtcg

SEQ ID NO: 854 - protein, 343 aa, synthetic construct
  REGION 1..343: note = variant of RNA ligase 2 from Escherichia phage RB69 (Bacteriophage RB69)
MHHHHHHGGSGMFKKYSSLENHYNSKFIEKLYANGLTDGVWVAREKIHGTNFSLIIERDNVTCAKRTGPIKPTETFYGYEIVLKKYDKAIKTVQKSMYTAGAVSYQVFGEFAGNGIWKGVDYGEKDFYVFDILINAESGDNTYLTDYEMQDFCNEYGFKMAPMLGRGTFDSLIMIPNDFDSVLMAYNALAKEDLVKANNCVFDANVIGDNTAEGYVLKPCEPKWLPNGTRVAIKCKNSKFSEKKKSDKPIKTQVPLTEIDKNLLDVLACYVTLNRVNNVISKIGTVTPKDFEKVMWLTVQDILEETSREGIVLTTSDNPDLVKKELVRMVQDVLESAWRELVS

SEQ ID NO: 855 - DNA, 1029 bp, synthetic construct
  misc_feature 1..1029: note = variant of RNA ligase 2 from Escherichia phage RB69 (Bacteriophage RB69)
  source 1..1029: mol_type = other DNA
atgcatcaccatcaccatcacggtggcagcggtatgtttaagaaatattctagtctggaaaaccattacaatagcaaattcattgagaaactctatgctaacggcttaactgatggtgtatgggttgcgcgcgaaaagatccacgggacgaacttttcgctgattatcgagcgtgataatgtaacatgcgccaaacgtacaggcccgattaagcctaccgaaaccttctacggttatgaaatcgtcctgaagaaatacgataaagcgattaagacggtgcagaaatctatgtataccgccggcgccgtttcctaccaagtgttcggagaatttgctggcaacggtatctggaaaggggtcgattatggcgagaaagacttctatgtgtttgatattctgatcaatgcggaatcaggagacaacacgtacctgactgattatgaaatgcaggacttctgtaatgaatatgggtttaagatggcaccaatgcttggtcgcggcacattcgatagcctgattatgattccgaacgatttcgattcggttctcatggcttacaatgcaacggcgaaagaggacctggtaaaagcgaacaacagcgtctttgatgccaatgtgatcggtgataacactgctgaaggctatgttcttaaaccgtgtgaacccaaatggttaccgaatgggacgcgtgtggcgatcaaatgcaagaactccaaattcagcgagaagaagaaaagtgacaaaccgatcaagacacaagtcccactgacggaaattgataagaatctgctggacgtattggcctgttatgtcactttaaaccgcgtgaacaacgtgatctctaagattggaacagtgacgccgaaagattttgagaaagtaatgtggctgactgttcaggatattctggaagaaacgtcacgtgagggtattgttctgacgacatcggacaatcctgacctcgtcaagaaagaacttgtccgcatggtgcaggatgagttaaaatcggcatggcgcgaactggtgtcg

SEQ ID NO: 856 - protein, 343 aa, synthetic construct
  REGION 1..343: note = variant of RNA ligase 2 from Escherichia phage RB69 (Bacteriophage RB69)
MHHHHHHGGSGMFKKYSSLENHYNSKFIEKLYANGLTDGVWVAREKIHGTNFSLIIERDNVTCAKRTGPIKPTETFYGYEIVLKKYDKAIKTVQKSMYTAGAVSYQVFGEFAGNGIWKGVDYGEKDFYVFDILINAESGDNTYLTDYEMQDFCNEYGFKMAPMLGRGTFDSLIMIPNDFDSVLMAYNATAKEDLVKANNSVFDANVIGDNTAEGYVLKPCEPKWLPNGTRVAIKCKNSKFSEKKKSDKPIKTQVPLTEIDKNLLDVLACYVTLNRVNNVISKIGTVTPKDFEKVMWLTVQDILEETSREGIVLTTSDNPDLVKKELVRMVQDELKSAWRELVS

SEQ ID NO: 857 - DNA, 1029 bp, synthetic construct
  misc_feature 1..1029: note = variant of RNA ligase 2 from Escherichia phage RB69 (Bacteriophage RB69)
  source 1..1029: mol_type = other DNA
atgcatcaccatcaccatcacggtggcagcggtatgtttaagaaatattctagtctggaaaaccattacaatagcaaattcattgagaaactctatgctaacggcttaactgatggtgtatgggttgcgcgcgaaaagatccacgggacgaacttttcgctgattatcgagcgtgataatgtaacatgcgccaaacgtacaggcccgattaagcctaccgaaaccttctacggttatgaaatcgtcctgaagaaatacgataaagcgattaagacggtgcagaaatctatgtataccgccggcgccgtttcctaccaagtgttcggagaatttgctggcaacggtatctggaaaggggtcgattatggcgagaaagacttctatgtgtttgatattctgatcaatgcggaatcaggagacaacacgtacctgactgattatgaaatgcaggacttctgtaatgaatgtgggtttaagatggcaccaatgcttggtcgcggcacattcgatagcctgattatgattccgaacgatttcgattcggttctcatggcttacaatgcaacggcgaaagaggacctggtaaaagcgaacaactgcgtctttgatgccaatgtgatcggtgataacactgctgaaggctatgttcttaaaccgtgtgaacccaaatggttaccgaatgggacgcgtgtggcgatcaaatgcaagaactccaaattcagcgagaagaagaaaagtgacaaaccgatcaagacacaagtcccactgacggaaattgataagaatctgctggacgtattggcctgttatgtcactttaaaccgcgtgaacaacgtgatctctaagattggaacagtgacgccgcatgattttgagaaagtaatgtggctgactgttcaggatattctggaagaaacgtcacgtgagggtattgttctgacgacatcggacaatcctgacctcgtcaagaaagaacttgtccgcatggtgcaggatgtgttagaatcggcatggcgcgaactggtgtcg

SEQ ID NO: 858 - protein, 343 aa, synthetic construct
  REGION 1..343: note = variant of RNA ligase 2 from Escherichia phage RB69 (Bacteriophage RB69)
MHHHHHHGGSGMFKKYSSLENHYNSKFIEKLYANGLTDGVWVAREKIHGTNFSLIIERDNVTCAKRTGPIKPTETFYGYEIVLKKYDKAIKTVQKSMYTAGAVSYQVFGEFAGNGIWKGVDYGEKDFYVFDILINAESGDNTYLTDYEMQDFCNECGFKMAPMLGRGTFDSLIMIPNDFDSVLMAYNATAKEDLVKANNCVFDANVIGDNTAEGYVLKPCEPKWLPNGTRVAIKCKNSKFSEKKKSDKPIKTQVPLTEIDKNLLDVLACYVTLNRVNNVISKIGTVTPHDFEKVMWLTVQDILEETSREGIVLTTSDNPDLVKKELVRMVQDVLESAWRELVS

SEQ ID NO: 859 - DNA, 1029 bp, synthetic construct
  misc_feature 1..1029: note = variant of RNA ligase 2 from Escherichia phage RB69 (Bacteriophage RB69)
  source 1..1029: mol_type = other DNA
atgcatcaccatcaccatcacggtggcagcggtatgtttaagaaatattctagtctggaaaaccattacaatagcaaattcattgagaaactctatgctaacggcttaactgatggtgtatgggttgcgcgcgaaaagatccacgggacgaacttttcgctgattatcgagcgtgataatgtaacatgcgccaaacgtacaggcccgattaagcctaccgaaaccttctacggttatgaaatcgtcctgaagaaatacgataaagcgattaagacggtgcagaaatctatgtataccgccggcgccgtttcctaccaagtgttcggagaatttgctggcaacggtatctggaaaggggtcgattatggcgagaaagacttctatgtgtttgatattctgatcaatgcggaatcaggagacaacacgtacctgactgattatgaaatgcaggacttctgtaatgaatttgggtttaagatggcaccaatgcttggtcgcggcacattcgatagcctgattatgattccgaacgatttcgattcggttctcatggcttacaatgcaaccgcgaaagaggacctggtaaaagcgaacaacagcgtctttgatgccaatgtgatcggtgataacactgctgaaggctatgttcttaaaccgtgtgaacccaaatggttaccgaatgggacgcgtgtggcgatcaaatgcaagaactccaaattcagcgagaagaagaaaagtgacaaaccgatcaagacacaagtcccactgacggaaattgataagaatctgctggacgtattggcctgttatgtcactttaaaccgcgtgaacaacgtgatctctaagattggaacagtgacgccgaaagattttgagaaagtaatgtggctgactgttcaggatattctggaagaaacgtcacgtgagggtattgttctgacgacatcggacaatcctgacctcgtcaagaaagaacttgtccgcatggtgcaggatgagttaaaatcggcatggcgcgaactggtgtcg

SEQ ID NO: 860 - protein, 343 aa, synthetic construct
  REGION 1..343: note = variant of RNA ligase 2 from Escherichia phage RB69 (Bacteriophage RB69)
MHHHHHHGGSGMFKKYSSLENHYNSKFIEKLYANGLTDGVWVAREKIHGTNFSLIIERDNVTCAKRTGPIKPTETFYGYEIVLKKYDKAIKTVQKSMYTAGAVSYQVFGEFAGNGIWKGVDYGEKDFYVFDILINAESGDNTYLTDYEMQDFCNEFGFKMAPMLGRGTFDSLIMIPNDFDSVLMAYNATAKEDLVKANNSVFDANVIGDNTAEGYVLKPCEPKWLPNGTRVAIKCKNSKFSEKKKSDKPIKTQVPLTEIDKNLLDVLACYVTLNRVNNVISKIGTVTPKDFEKVMWLTVQDILEETSREGIVLTTSDNPDLVKKELVRMVQDELKSAWRELVS

SEQ ID NO: 861 - DNA, 1029 bp, synthetic construct
  misc_feature 1..1029: note = variant of RNA ligase 2 from Escherichia phage RB69 (Bacteriophage RB69)
  source 1..1029: mol_type = other DNA
atgcatcaccatcaccatcacggtggcagcggtatgtttaagaaatattctagtctggaaaaccattacaatagcaaattcattgaaaaactctatgctaacggcttaactgatggtgtatgggttgcgcgcgaaaagatccacgggacgaacttttcgctgattatcgagcgtgataatgtaacatgcgccaaacgtacaggcccgattaagcctaccgaaaccttctacggttatgaaatcgtcctgaagaaatacgataaagcgattaagacggtgcagaaatctatgtataccgccggcgccgtttcctaccaagtgttcggagaatttgctggcaacggtatctggaaaggggtcgattatggcgagaaagacttctatgtgtttgatattctgatcaatgcggaatcaggagacaacacgtacctgactgattatgaaatgcaggacttctgtaatgaatttgggtttaagatggcaccaatgcttggtcgcgccacattcgatagcctgattatgattccgaacgatttcgattcggttctcatggcttacaatgcagtggcgaaagaggacctggtaaaagcgaacaactgcgtctttgatgccaatgtgatcggtgataacactgctgaaggctatgttcttaaaccgtgtgaacccaaatggttaccgaatgggacgcgtgtggcgatcaaatgcaagaactccaaattcagcgagaagaagaaaagtgacaaaccgatcaagacacaagtcccactgacggaaattgataagaatctgctggacgtattggcctgttatgtcactttaaaccgcgtgaacaacgtgatctctaagattggaacagtgacgccgaccgattttgagaaagtaatgtggctgactgttcaggatattctggaagaaacgtcacgtgagggtattgttctgacgacatcggacaatcctgacctcgtcaagaaagaacttgtccgcatggtgcaggatgtgttaaaatcggcatggcgcgaactggtgtcg

SEQ ID NO: 862 - protein, 343 aa, synthetic construct
  REGION 1..343: note = variant of RNA ligase 2 from Escherichia phage RB69 (Bacteriophage RB69)
MHHHHHHGGSGMFKKYSSLENHYNSKFIEKLYANGLTDGVWVAREKIHGTNFSLIIERDNVTCAKRTGPIKPTETFYGYEIVLKKYDKAIKTVQKSMYTAGAVSYQVFGEFAGNGIWKGVDYGEKDFYVFDILINAESGDNTYLTDYEMQDFCNEFGFKMAPMLGRATFDSLIMIPNDFDSVLMAYNAVAKEDLVKANNCVFDANVIGDNTAEGYVLKPCEPKWLPNGTRVAIKCKNSKFSEKKKSDKPIKTQVPLTEIDKNLLDVLACYVTLNRVNNVISKIGTVTPTDFEKVMWLTVQDILEETSREGIVLTTSDNPDLVKKELVRMVQDVLKSAWRELVS

SEQ ID NO: 863 - DNA, 1029 bp, synthetic construct
  misc_feature 1..1029: note = variant of RNA ligase 2 from Escherichia phage RB69 (Bacteriophage RB69)
  source 1..1029: mol_type = other DNA
atgcatcaccatcaccatcacggtggcagcggtatgtttaagaaatattctagtctggaaaaccattacaatagcaaattcattgaaaaactctatgctaacggcttaactgatggtgtatgggttgcgcgcgaaaagatccacgggacgaacttttcgctgattatcgagcgtgataatgtaacatgcgccaaacgtacaggcccgattaagcctaccgaaaccttctacggttatgaaatcgtcctgaagaaatacgataaagcgattaagacggtgcagaaatctatgtataccgccggcgccgtttcctaccaagtgttcggagaatttgctggcaacggtatctggaaaggggtcgattatggcgagaaagacttctatgtgtttgatattctgatcaatgcggaatcaggagacaacacgtacctgactgattatgaaatgcaggacttctgtaatgaatatgggtttaagatggcaccaatgcttggtcgcggcacattcgatagcctgattatgattccgaacgatttcgattcggttctcatggcttacaatgcactggcgaaagaggacctggtaaaagcgaacaacagcgtctttgatgccaatgtgatcggtgataacactgctgaaggctatgttcttaaaccgtgtgaacccaaatggttaccgaatgggacgcgtgtggcgatcaaatgcaagaactccaaattcagcgagaagaagaaaagtgacaaaccgatcaagacacaagtcccactgacggaaattgataagaatctgctggacgtattggcctgttatgtcactttaaaccgcgtgaacaacgtgatctctaagattggaacagtgacgccgagcgattttgagaaagtaatgtggctgactgttcaggatattctggaagaaacgtcacgtgagggtattgttctgacgacatcggacaatcctgacctcgtcaagaaagaacttgtccgcatggtgcaggatgtgttagaatcggcatggcgcgaactggtgtcg

SEQ ID NO: 864 - protein, 343 aa, synthetic construct
  REGION 1..343: note = variant of RNA ligase 2 from Escherichia phage RB69 (Bacteriophage RB69)
MHHHHHHGGSGMFKKYSSLENHYNSKFIEKLYANGLTDGVWVAREKIHGTNFSLIIERDNVTCAKRTGPIKPTETFYGYEIVLKKYDKAIKTVQKSMYTAGAVSYQVFGEFAGNGIWKGVDYGEKDFYVFDILINAESGDNTYLTDYEMQDFCNEYGFKMAPMLGRGTFDSLIMIPNDFDSVLMAYNALAKEDLVKANNSVFDANVIGDNTAEGYVLKPCEPKWLPNGTRVAIKCKNSKFSEKKKSDKPIKTQVPLTEIDKNLLDVLACYVTLNRVNNVISKIGTVTPSDFEKVMWLTVQDILEETSREGIVLTTSDNPDLVKKELVRMVQDVLESAWRELVS

SEQ ID NO: 865 - DNA, 1029 bp, synthetic construct
  misc_feature 1..1029: note = variant of RNA ligase 2 from Escherichia phage RB69 (Bacteriophage RB69)
  source 1..1029: mol_type = other DNA
atgcatcaccatcaccatcacggtggcagcggtatgtttaagaaatattctagtctggaaaaccattacaatagcaaattcattgagaaactctatgctaacggcttaactgatggtgtatgggttgcgcgcgaaaagatccacgggacgaacttttcgctgattatcgagcgtgataatgtaacatgcgccaaacgtacaggcccgattaagcctaccgaaaccttctacggttatgaaatcgtcctgaagaaatacgataaagcgattaagacggtgcagaaatctatgtataccgccggcgccgtttcctaccaagtgttcggagaatttgctggcaacggtatctggaaaggggtcgattatggcgagaaagacttctatgtgtttgatattctgatcaatgcggaatcaggagacaacacgtacctgactgattatgaaatgcaggacttctgtaatgaatgtgggtttaagatggcaccaatgcttggtcgcggcacattcgatagcctgattatgattccgaacgatttcgattcggttctcatggcttacaatgcaaccgcgaaagaggacctggtaaaagcgaacaacagcgtctttgatgccaatgtgatcggtgataacactgctgaaggctatgttcttaaaccgtgtgaacccaaatggttaccgaatgggacgcgtgtggcgatcaaatgcaagaactccaaattcagcgagaagaagaaaagtgacaaaccgatcaagacacaagtcccactgacggaaattgataagaatctgctggacgtattggcctgttatgtcactttaaaccgcgtgaacaacgtgatctctaagattggaacagtgacgccgagcgattttgagaaagtaatgtggctgactgttcaggatattctggaagaaacgtcacgtgagggtattgttctgacgacatcggacaatcctgacctcgtcaagaaagaacttgtccgcatggtgcaggatgagttagaatcggcatggcgcgaactggtgtcg

SEQ ID NO: 866 - protein, 343 aa, synthetic construct
  REGION 1..343: note = variant of RNA ligase 2 from Escherichia phage RB69 (Bacteriophage RB69)
MHHHHHHGGSGMFKKYSSLENHYNSKFIEKLYANGLTDGVWVAREKIHGTNFSLIIERDNVTCAKRTGPIKPTETFYGYEIVLKKYDKAIKTVQKSMYTAGAVSYQVFGEFAGNGIWKGVDYGEKDFYVFDILINAESGDNTYLTDYEMQDFCNECGFKMAPMLGRGTFDSLIMIPNDFDSVLMAYNATAKEDLVKANNSVFDANVIGDNTAEGYVLKPCEPKWLPNGTRVAIKCKNSKFSEKKKSDKPIKTQVPLTEIDKNLLDVLACYVTLNRVNNVISKIGTVTPSDFEKVMWLTVQDILEETSREGIVLTTSDNPDLVKKELVRMVQDELESAWRELVS

SEQ ID NO: 867 - DNA, 1029 bp, synthetic construct
  misc_feature 1..1029: note = variant of RNA ligase 2 from Escherichia phage RB69 (Bacteriophage RB69)
  source 1..1029: mol_type = other DNA
atgcatcaccatcaccatcacggtggcagcggtatgtttaagaaatattctagtctggaaaaccattacaatagcaaattcattgagaaactctatgctaacggcttaactgatggtgtatgggttgcgcgcgaaaagatccacgggacgaacttttcgctgattatcgagcgtgataatgtaacatgcgccaaacgtacaggcccgattaagcctaccgaaaccttctacggttatgaaatcgtcctgaagaaatacgataaagcgattaagacggtgcagaaatctatgtataccgccggcgccgtttcctaccaagtgttcggagaatttgctggcaacggtatctggaaaggggtcgattatggcgagaaagacttctatgtgtttgatattctgatcaatgcggaatcaggagacaacacgtacctgactgattatgaaatgcaggacttctgtaatgaatatgggtttaagatggcaccaatgcttggtcgcggcacattcgatagcctgattatgattccgaacgatttcgattcggttctcatggcttacaatgcagtggcgaaagaggacctggtaaaagcgaacaacagcgtctttgatgccaatgtgatcggtgataacactgctgaaggctatgttcttaaaccgtgtgaacccaaatggttaccgaatgggacgcgtgtggcgatcaaatgcaagaactccaaattcagcgagaagaagaaaagtgacaaaccgatcaagacacaagtcccactgacggaaattgataagaatctgctggacgtattggcctgttatgtcactttaaaccgcgtgaacaacgtgatctctaagattggaacagtgacgccgaccgattttgagaaagtaatgtggctgactgttcaggatattctggaagaaacgtcacgtgagggtattgttctgacgacatcggacaatcctgacctcgtcaagaaagaacttgtccgcatggtgcaggatgagttaaaatcggcatggcgcgaactggtgtcg

SEQ ID NO: 868 - protein, 343 aa, synthetic construct
  REGION 1..343: note = variant of RNA ligase 2 from Escherichia phage RB69 (Bacteriophage RB69)
MHHHHHHGGSGMFKKYSSLENHYNSKFIEKLYANGLTDGVWVAREKIHGTNFSLIIERDNVTCAKRTGPIKPTETFYGYEIVLKKYDKAIKTVQKSMYTAGAVSYQVFGEFAGNGIWKGVDYGEKDFYVFDILINAESGDNTYLTDYEMQDFCNEYGFKMAPMLGRGTFDSLIMIPNDFDSVLMAYNAVAKEDLVKANNSVFDANVIGDNTAEGYVLKPCEPKWLPNGTRVAIKCKNSKFSEKKKSDKPIKTQVPLTEIDKNLLDVLACYVTLNRVNNVISKIGTVTPTDFEKVMWLTVQDILEETSREGIVLTTSDNPDLVKKELVRMVQDELKSAWRELVS

SEQ ID NO: 869 - DNA, 1029 bp, synthetic construct
  misc_feature 1..1029: note = variant of RNA ligase 2 from Escherichia phage RB69 (Bacteriophage RB69)
  source 1..1029: mol_type = other DNA
atgcatcaccatcaccatcacggtggcagcggtatgtttaagaaatattctagtctggaaaaccattacaatagcaaattcattgagaaactctatgctaacggcttaactgatggtgtatgggttgcgcgcgaaaagatccacgggacgaacttttcgctgattatcgagcgtgataatgtaacatgcgccaaacgtacaggcccgattaagcctaccgaaaccttctacggttatgaaatcgtcctgaagaaatacgataaagcgattaagacggtgcagaaatctatgtataccgccggcgccgtttcctaccaagtgttcggagaatttgctggcaacggtatctggaaaggggtcgattatggcgagaaagacttctatgtgtttgatattctgatcaatgcggaatcaggagacaacacgtacctgactgattatgaaatgcaggacttctgtaatgaatgtgggtttaagatggcaccaatgcttggtcgcggcacattcgatagcctgattatgattccgaacgatttcgattcggttctcatggcttacaatgcaacggcgaaagaggacctggtaaaagcgaacaactgcgtctttgatgccaatgtgatcggtgataacactgctgaaggctatgttcttaaaccgtgtgaacccaaatggttaccgaatgggacgcgtgtggcgatcaaatgcaagaactccaaattcagcgagaagaagaaaagtgacaaaccgatcaagacacaaggcccactgacggaaattgataagaatctgctggacgtattggcctgttatgtcactttaaaccgcgtgaacaacgtgatctctaagattggaacagtgacgccgcatgattttgagaaagtaatgtggctgactgttcaggatattctggaagaaacgtcacgtgagggtattgttctgacgacatcggacaatcctgacctcgtcaagaaagaacttgtccgcatggtgcaggatgagttagaatcggcatggcgcgaactggtgtcg

SEQ ID NO: 870 - protein, 343 aa, synthetic construct
  REGION 1..343: note = variant of RNA ligase 2 from Escherichia phage RB69 (Bacteriophage RB69)
MHHHHHHGGSGMFKKYSSLENHYNSKFIEKLYANGLTDGVWVAREKIHGTNFSLIIERDNVTCAKRTGPIKPTETFYGYEIVLKKYDKAIKTVQKSMYTAGAVSYQVFGEFAGNGIWKGVDYGEKDFYVFDILINAESGDNTYLTDYEMQDFCNECGFKMAPMLGRGTFDSLIMIPNDFDSVLMAYNATAKEDLVKANNCVFDANVIGDNTAEGYVLKPCEPKWLPNGTRVAIKCKNSKFSEKKKSDKPIKTQGPLTEIDKNLLDVLACYVTLNRVNNVISKIGTVTPHDFEKVMWLTVQDILEETSREGIVLTTSDNPDLVKKELVRMVQDELESAWRELVS

SEQ ID NO: 871 - DNA, 1029 bp, synthetic construct
  misc_feature 1..1029: note = variant of RNA ligase 2 from Escherichia phage RB69 (Bacteriophage RB69)
  source 1..1029: mol_type = other DNA
atgcatcaccatcaccatcacggtggcagcggtatgtttaagaaatattctagtctggaaaaccattacaatagcaaattcattgagaaactctatgctaacggcttaactgatggtgtatgggttgcgcgcgaaaagatccacgggacgaacttttcgctgattatcgagcgtgataatgtaacatgcgccaaacgtacaggcccgattaagcctaccgaaaccttctacggttatgaaatcgtcctgaagaaatacgataaagcgattaagacggtgcagaaatctatgtataccgccggcgccgtttcctaccaagtgttcggagaatttgctggcaacggtatctggaaaggggtcgattatggcgagaaagacttctatgtgtttgatattctgatcaatgcggaatcaggagacaacacgtacctgactgattatgaaatgcaggacttctgtaatgaatgtgggtttaagatggcaccaatgcttggtcgcggcacattcgatagcctgattatgattccgaacgatttcgattcggttctcatggcttacaatgcactggcgaaagaggacctggtaaaagcgaacaactgcgtctttgatgccaatgtgatcggtgataacactgctgaaggctatgttcttaaaccgtgtgaacccaaatggttaccgaatgggacgcgtgtggcgatcaaatgcaagaactccaaattcagcgagaagaagaaaagtgacaaaccgatcaagacacaaggcccactgacggaaattgataagaatctgctggacgtattggcctgttatgtcactttaaaccgcgtgaacaacgtgatctctaagattggaacagtgacgccgcatgattttgagaaagtaatgtggctgactgttcaggatattctggaagaaacgtcacgtgagggtattgttctgacgacatcggacaatcctgacctcgtcaagaaagaacttgtccgcatggtgcaggatgagttagaatcggcatggcgcgaactggtgtcg

SEQ ID NO: 872 - protein, 343 aa, synthetic construct
  REGION 1..343: note = variant of RNA ligase 2 from Escherichia phage RB69 (Bacteriophage RB69)
MHHHHHHGGSGMFKKYSSLENHYNSKFIEKLYANGLTDGVWVAREKIHGTNFSLIIERDNVTCAKRTGPIKPTETFYGYEIVLKKYDKAIKTVQKSMYTAGAVSYQVFGEFAGNGIWKGVDYGEKDFYVFDILINAESGDNTYLTDYEMQDFCNECGFKMAPMLGRGTFDSLIMIPNDFDSVLMAYNALAKEDLVKANNCVFDANVIGDNTAEGYVLKPCEPKWLPNGTRVAIKCKNSKFSEKKKSDKPIKTQGPLTEIDKNLLDVLACYVTLNRVNNVISKIGTVTPHDFEKVMWLTVQDILEETSREGIVLTTSDNPDLVKKELVRMVQDELESAWRELVS

SEQ ID NO: 873 - DNA, 1029 bp, synthetic construct
  misc_feature 1..1029: note = variant of RNA ligase 2 from Escherichia phage RB69 (Bacteriophage RB69)
  source 1..1029: mol_type = other DNA
atgcatcaccatcaccatcacggtggcagcggtatgtttaagaaatattctagtctggaaaaccattacaatagcaaattcattgagaaactctatgctaacggcttaactgatggtgtatgggttgcgcgcgaaaagatccacgggacgaacttttcgctgattatcgagcgtgataatgtaacatgcgccaaacgtacaggcccgattaagcctaccgaaaccttctacggttatgaaatcgtcctgaagaaatacgataaagcgattaagacggtgcagaaatctatgtataccgccggcgccgtttcctaccaagtgttcggagaatttgctggcaacggtatctggaaaggggtcgattatggcgagaaagacttctatgtgtttgatattctgatcaatgcggaatcaggagacaacacgtacctgactgattatgaaatgcaggacttctgtaatgaatgtgggtttaagatggcaccaatgcttggtcgcggcacattcgatagcctgattatgattccgaacgatttcgattcggttctcatggcttacaatgcaacggcgaaagaggacctggtaaaagcgaacaactgcgtctttgatgccaatgtgatcggtgataacactgctgaaggctatgttcttaaaccgtgtgaacccaaatggttaccgaatgggacgcgtgtggcgatcaaatgcaagaactccaaattcagcgagaagaagaaaagtgacaaaccgatcaagacacaagtcccactgacggaaattgataagaatctgctggacgtattggcctgttatgtcactttaaaccgcgtgaacaacgtgatctctaagattggaacagtgacgccgagcgattttgagaaagtaatgtggctgactgttcaggatattctggaagaaacgtcacgtgagggtattgttctgacgacatcggacaatcctgacctcgtcaagaaagaacttgtccgcatggtgcaggatgtgttaaaatcggcatggcgcgaactggtgtcg

SEQ ID NO: 874 - protein, 343 aa, synthetic construct; identical to SEQ ID NO: 572
  REGION 1..343: note = variant of RNA ligase 2 from Escherichia phage RB69 (Bacteriophage RB69)

SEQ ID NO: 875 - DNA, 1029 bp, synthetic construct
  misc_feature 1..1029: note = variant of RNA ligase 2 from Escherichia phage RB69 (Bacteriophage RB69)
  source 1..1029: mol_type = other DNA
atgcatcaccatcaccatcacggtggcagcggtatgtttaagaaatattctagtctggaaaaccattacaatagcaaattcattgagaaactctatgctaacggcttaactgatggtgtatgggttgcgcgcgaaaagatccacgggacgaacttttcgctgattatcgagcgtgataatgtaacatgcgccaaacgtacaggcccgattaagcctaccgaaaccttctacggttatgaaatcgtcctgaagaaatacgataaagcgattaagacggtgcagaaatctatgtataccgccggcgccgtttcctaccaagtgttcggagaatttgctggcaacggtatctggaaaggggtcgattatggcgagaaagacttctatgtgtttgatattctgatcaatgcggaatcaggagacaacacgtacctgactgattatgaaatgcaggacttctgtaatgaatgtgggtttaagatggcaccaatgcttggtcgcggcacattcgatagcctgattatgattccgaacgatttcgattcggttctcatggcttacaatgcagtggcgaaagaggacctggtaaaagcgaacaactgcgtctttgatgccaatgtgatcggtgataacactgctgaaggctatgttcttaaaccgtgtgaacccaaatggttaccgaatgggacgcgtgtggcgatcaaatgcaagaactccaaattcagcgagaagaagaaaagtgacaaaccgatcaagacacaagtcccactgacggaaattgataagaatctgctggacgtattggcctgttatgtcactttaaaccgcgtgaacaacgtgatctctaagattggaacagtgacgccgagcgattttgagaaagtaatgtggctgactgttcaggatattctggaagaaacgtcacgtgagggtattgttctgacgacatcggacaatcctgacctcgtcaagaaagaacttgtccgcatggtgcaggatgtgttaaaatcggcatggcgcgaactggtgtcg

SEQ ID NO: 876 - protein, 343 aa, synthetic construct
  REGION 1..343: note = variant of RNA ligase 2 from Escherichia phage RB69 (Bacteriophage RB69)
MHHHHHHGGSGMFKKYSSLENHYNSKFIEKLYANGLTDGVWVAREKIHGTNFSLIIERDNVTCAKRTGPIKPTETFYGYEIVLKKYDKAIKTVQKSMYTAGAVSYQVFGEFAGNGIWKGVDYGEKDFYVFDILINAESGDNTYLTDYEMQDFCNECGFKMAPMLGRGTFDSLIMIPNDFDSVLMAYNAVAKEDLVKANNCVFDANVIGDNTAEGYVLKPCEPKWLPNGTRVAIKCKNSKFSEKKKSDKPIKTQVPLTEIDKNLLDVLACYVTLNRVNNVISKIGTVTPSDFEKVMWLTVQDILEETSREGIVLTTSDNPDLVKKELVRMVQDVLKSAWRELVS

SEQ ID NO: 877 - DNA, 1029 bp, synthetic construct
  misc_feature 1..1029: note = variant of RNA ligase 2 from Escherichia phage RB69 (Bacteriophage RB69)
  source 1..1029: mol_type = other DNA
atgcatcaccatcaccatcacggtggcagcggtatgtttaagaaatattctagtctggaaaaccattacaatagcaaattcattgagaaactctatgctaacggcttaactgatggtgtatgggttgcgcgcgaaaagatccacgggacgaacttttcgctgattatcgagcgtgataatgtaacatgcgccaaacgtacaggcccgattaagcctaccgaaaccttctacggttatgaaatcgtcctgaagaaatacgataaagcgattaagacggtgcagaaatctatgtataccgccggcgccgtttcctaccaagtgttcggagaatttgctggcaacggtatctggaaaggggtcgattatggcgagaaagacttctatgtgtttgatattctgatcaatgcggaatcaggagacaacacgtacctgactgattatgaaatgcaggacttctgtaatgaatgtgggtttaagatggcaccaatgcttggtcgcggcacattcgatagcctgattatgattccgaacgatttcgattcggttctcatggcttacaatgcagtggcgaaagaggacctggtaaaagcgaacaactgcgtctttgatgccaatgtgatcggtgataacactgctgaaggctatgttcttaaaccgtgtgaacccaaatggttaccgaatgggacgcgtgtggcgatcaaatgcaagaactccaaattcagcgagaagaagaaaagtgacaaaccgatcaagacacaagtcccactgacggaaattgataagaatctgctggacgtattggcctgttatgtcactttaaaccgcgtgaacaacgtgatctctaagattggaacagtgacgccgcatgattttgagaaagtaatgtggctgactgttcaggatattctggaagaaacgtcacgtgagggtattgttctgacgacatcggacaatcctgacctcgtcaagaaagaacttgtccgcatggtgcaggatgtgttagaatcggcatggcgcgaactggtgtcg

SEQ ID NO: 878 - protein, 343 aa, synthetic construct
  REGION 1..343: note = variant of RNA ligase 2 from Escherichia phage RB69 (Bacteriophage RB69)
MHHHHHHGGSGMFKKYSSLENHYNSKFIEKLYANGLTDGVWVAREKIHGTNFSLIIERDNVTCAKRTGPIKPTETFYGYEIVLKKYDKAIKTVQKSMYTAGAVSYQVFGEFAGNGIWKGVDYGEKDFYVFDILINAESGDNTYLTDYEMQDFCNECGFKMAPMLGRGTFDSLIMIPNDFDSVLMAYNAVAKEDLVKANNCVFDANVIGDNTAEGYVLKPCEPKWLPNGTRVAIKCKNSKFSEKKKSDKPIKTQVPLTEIDKNLLDVLACYVTLNRVNNVISKIGTVTPHDFEKVMWLTVQDILEETSREGIVLTTSDNPDLVKKELVRMVQDVLESAWRELVS

SEQ ID NO: 879 - DNA, 1029 bp, synthetic construct
  misc_feature 1..1029: note = variant of RNA ligase 2 from Escherichia phage RB69 (Bacteriophage RB69)
  source 1..1029: mol_type = other DNA
atgcatcaccatcaccatcacggtggcagcggtatgtttaagaaatattctagtctggaaaaccattacaatagcaaattcattgaaaaactctatgctaacggcttaactgatggtgtatgggttgcgcgcgaaaagatccacgggacgaacttttcgctgattatcgagcgtgataatgtaacatgcgccaaacgtacaggcccgattaagcctaccgaaaccttctacggttatgaaatcgtcctgaagaaatacgataaagcgattaagacggtgcagaaatctatgtataccgccggcgccgtttcctaccaagtgttcggagaatttgctggcaacggtatctggaaaggggtcgattatggcgagaaagacttctatgtgtttgatattctgatcaatgcggaatcaggagacaacacgtacctgactgattatgaaatgcaggacttctgtaatgaatttgggtttaagatggcaccaatgcttggtcgcggcacattcgatagcctgattatgattccgaacgatttcgattcggttctcatggcttacaatgcaaccgcgaaagaggacctggtaaaagcgaacaactgcgtctttgatgccaatgtgatcggtgataacactgctgaaggctatgttcttaaaccgtgtgaacccaaatggttaccgaatgggacgcgtgtggcgatcaaatgcaagaactccaaattcagcgagaagaagaaaagtgacaaaccgatcaagacacaagtcccactgacggaaattgataagaatctgctggacgtattggcctgttatgtcactttaaaccgcgtgaacaacgtgatctctaagattggaacagtgacgccgaccgattttgagaaagtaatgtggctgactgttcaggatattctggaagaaacgtcacgtgagggtattgttctgacgacatcggacaatcctgacctcgtcaagaaagaacttgtccgcatggtgcaggatgtgttaaaatcggcatggcgcgaactggtgtcg

SEQ ID NO: 880 - protein, 343 aa, synthetic construct
  REGION 1..343: note = variant of RNA ligase 2 from Escherichia phage RB69 (Bacteriophage RB69)
MHHHHHHGGSGMFKKYSSLENHYNSKFIEKLYANGLTDGVWVAREKIHGTNFSLIIERDNVTCAKRTGPIKPTETFYGYEIVLKKYDKAIKTVQKSMYTAGAVSYQVFGEFAGNGIWKGVDYGEKDFYVFDILINAESGDNTYLTDYEMQDFCNEFGFKMAPMLGRGTFDSLIMIPNDFDSVLMAYNATAKEDLVKANNCVFDANVIGDNTAEGYVLKPCEPKWLPNGTRVAIKCKNSKFSEKKKSDKPIKTQVPLTEIDKNLLDVLACYVTLNRVNNVISKIGTVTPTDFEKVMWLTVQDILEETSREGIVLTTSDNPDLVKKELVRMVQDVLKSAWRELVS

SEQ ID NO: 881 - DNA, 1029 bp, synthetic construct
  misc_feature 1..1029: note = variant of RNA ligase 2 from Escherichia phage RB69 (Bacteriophage RB69)
  source 1..1029: mol_type = other DNA
atgcatcaccatcaccatcacggtggcagcggtatgtttaagaaatattctagtctggaaaaccattacaatagcaaattcattgagaaactctatgctaacggcttaactgatggtgtatgggttgcgcgcgaaaagatccacgggacgaacttttcgctgattatcgagcgtgataatgtaacatgcgccaaacgtacaggcccgattaagcctaccgaaaccttctacggttatgaaatcgtcctgaagaaatacgataaagcgattaagacggtgcagaaatctatgtataccgccggcgccgtttcctaccaagtgttcggagaatttgctggcaacggtatctggaaaggggtcgattatggcgagaaagacttctatgtgtttgatattctgatcaatgcggaatcaggagacaacacgtacctgactgattatgaaatgcaggacttctgtaatgaatttgggtttaagatggcaccaatgcttggtcgcggcacattcgatagcctgattatgattccgaacgatttcgattcggttctcatggcttacaatgcagtggcgaaagaggacctggtaaaagcgaacaactgcgtctttgatgccaatgtgatcggtgataacactgctgaaggctatgttcttaaaccgtgtgaacccaaatggttaccgaatgggacgcgtgtggcgatcaaatgcaagaactccaaattcagcgagaagaagaaaagtgacaaaccgatcaagacacaaggcccactgacggaaattgataagaatctgctggacgtattggcctgttatgtcactttaaaccgcgtgaacaacgtgatctctaagattggaacagtgacgccgagcgattttgagaaagtaatgtggctgactgttcaggatattctggaagaaacgtcacgtgagggtattgttctgacgacatcggacaatcctgacctcgtcaagaaagaacttgtccgcatggtgcaggatgtgttaaaatcggcatggcgcgaactggtgtcg

SEQ ID NO: 882 - protein, 343 aa, synthetic construct
  REGION 1..343: note = variant of RNA ligase 2 from Escherichia phage RB69 (Bacteriophage RB69)
MHHHHHHGGSGMFKKYSSLENHYNSKFIEKLYANGLTDGVWVAREKIHGTNFSLIIERDNVTCAKRTGPIKPTETFYGYEIVLKKYDKAIKTVQKSMYTAGAVSYQVFGEFAGNGIWKGVDYGEKDFYVFDILINAESGDNTYLTDYEMQDFCNEFGFKMAPMLGRGTFDSLIMIPNDFDSVLMAYNAVAKEDLVKANNCVFDANVIGDNTAEGYVLKPCEPKWLPNGTRVAIKCKNSKFSEKKKSDKPIKTQGPLTEIDKNLLDVLACYVTLNRVNNVISKIGTVTPSDFEKVMWLTVQDILEETSREGIVLTTSDNPDLVKKELVRMVQDVLKSAWRELVS

SEQ ID NO: 883 - DNA, 1029 bp, synthetic construct
  misc_feature 1..1029: note = variant of RNA ligase 2 from Escherichia phage RB69 (Bacteriophage RB69)
  source 1..1029: mol_type = other DNA
atgcatcaccatcaccatcacggtggcagcggtatgtttaagaaatattctagtctggaaaaccattacaatagcaaattcattgagaaactctatgctaacggcttaactgatggtgtatgggttgcgcgcgaaaagatccacgggacgaacttttcgctgattatcgagcgtgataatgtaacatgcgccaaacgtacaggcccgattaagcctaccgaaaccttctacggttatgaaatcgtcctgaagaaatacgataaagcgattaagacggtgcagaaatctatgtataccgccggcgccgtttcctaccaagtgttcggagaatttgctggcaacggtatctggaaaggggtcgattatggcgagaaagacttctatgtgtttgatattctgatcaatgcggaatcaggagacaacacgtacctgactgattatgaaatgcaggacttctgtaatgaatatgggtttaagatggcaccaatgcttggtcgcggcacattcgatagcctgattatgattccgaacgatttcgattcggttctcatggcttacaatgcaacggcgaaagaggacctggtaaaagcgaacaactgcgtctttgatgccaatgtgatcggtgataacactgctgaaggctatgttcttaaaccgtgtgaacccaaatggttaccgaatgggacgcgtgtggcgatcaaatgcaagaactccaaattcagcgagaagaagaaaagtgacaaaccgatcaagacacaagtcccactgacggaaattgataagaatctgctggacgtattggcctgttatgtcactttaaaccgcgtgaacaacgtgatctctaagattggaacagtgacgccgaaagattttgagaaagtaatgtggctgactgttcaggatattctggaagaaacgtcacgtgagggtattgttctgacgacatcggacaatcctgacctcgtcaagaaagaacttgtccgcatggtgcaggatgagttaaaatcggcatggcgcgaactggtgtcg

SEQ ID NO: 884 - protein, 343 aa, synthetic construct
  REGION 1..343: note = variant of RNA ligase 2 from Escherichia phage RB69 (Bacteriophage RB69)
MHHHHHHGGSGMFKKYSSLENHYNSKFIEKLYANGLTDGVWVAREKIHGTNFSLIIERDNVTCAKRTGPIKPTETFYGYEIVLKKYDKAIKTVQKSMYTAGAVSYQVFGEFAGNGIWKGVDYGEKDFYVFDILINAESGDNTYLTDYEMQDFCNEYGFKMAPMLGRGTFDSLIMIPNDFDSVLMAYNATAKEDLVKANNCVFDANVIGDNTAEGYVLKPCEPKWLPNGTRVAIKCKNSKFSEKKKSDKPIKTQVPLTEIDKNLLDVLACYVTLNRVNNVISKIGTVTPKDFEKVMWLTVQDILEETSREGIVLTTSDNPDLVKKELVRMVQDELKSAWRELVS

SEQ ID NO: 885 - DNA, 1029 bp, synthetic construct
  misc_feature 1..1029: note = variant of RNA ligase 2 from Escherichia phage RB69 (Bacteriophage RB69)
  source 1..1029: mol_type = other DNA
atgcatcaccatcaccatcacggtggcagcggtatgtttaagaaatattctagtctggaaaaccattacaatagcaaattcattgagaaactctatgctaacggcttaactgatggtgtatgggttgcgcgcgaaaagatccacgggacgaacttttcgctgattatcgagcgtgataatgtaacatgcgccaaacgtacaggcccgattaagcctaccgaaaccttctacggttatgaaatcgtcctgaagaaatacgataaagcgattaagacggtgcagaaatctatgtataccgccggcgccgtttcctaccaagtgttcggagaatttgctggcaacggtatctggaaaggggtcgattatggcgagaaagacttctatgtgtttgatattctgatcaatgcggaatcaggagacaacacgtacctgactgattatgaaatgcaggacttctgtaatgaatgtgggtttaagatggcaccaatgcttggtcgcggcacattcgatagcctgattatgattccgaacgatttcgattcggttctcatggcttacaatgcaaccgcgaaagaggacctggtaaaagcgaacaactgcgtctttgatgccaatgtgatcggtgataacactgctgaaggctatgttcttaaaccgtgtgaacccaaatggttaccgaatgggacgcgtgtggcgatcaaatgcaagaactccaaattcagcgagaagaagaaaagtgacaaaccgatcaagacacaagtcccactgacggaaattgataagaatctgctggacgtattggcctgttatgtcactttaaaccgcgtgaacaacgtgatctctaagattggaacagtgacgccgagcgattttgagaaagtaatgtggctgactgttcaggatattctggaagaaacgtcacgtgagggtattgttctgacgacatcggacaatcctgacctcgtcaagaaagaacttgtccgcatggtgcaggatgtgttagaatcggcatggcgcgaactggtgtcg

SEQ ID NO: 886 - protein, 343 aa, synthetic construct
  REGION 1..343: note = variant of RNA ligase 2 from Escherichia phage RB69 (Bacteriophage RB69)
MHHHHHHGGSGMFKKYSSLENHYNSKFIEKLYANGLTDGVWVAREKIHGTNFSLIIERDNVTCAKRTGPIKPTETFYGYEIVLKKYDKAIKTVQKSMYTAGAVSYQVFGEFAGNGIWKGVDYGEKDFYVFDILINAESGDNTYLTDYEMQDFCNECGFKMAPMLGRGTFDSLIMIPNDFDSVLMAYNATAKEDLVKANNCVFDANVIGDNTAEGYVLKPCEPKWLPNGTRVAIKCKNSKFSEKKKSDKPIKTQVPLTEIDKNLLDVLACYVTLNRVNNVISKIGTVTPSDFEKVMWLTVQDILEETSREGIVLTTSDNPDLVKKELVRMVQDVLESAWRELVS

SEQ ID NO: 887 - DNA, 1029 bp, synthetic construct
  misc_feature 1..1029: note = variant of RNA ligase 2 from Escherichia phage RB69 (Bacteriophage RB69)
  source 1..1029: mol_type = other DNA
atgcatcaccatcaccatcacggtggcagcggtatgtttaagaaatattctagtctggaaaaccattacaatagcaaattcattgaaaaactctatgctaacggcttaactgatggtgtatgggttgcgcgcgaaaagatccacgggacgaacttttcgctgattatcgagcgtgataatgtaacatgcgccaaacgtacaggcccgattaagcctaccgaaaccttctacggttatgaaatcgtcctgaagaaatacgataaagcgattaagacggtgcagaaatctatgtataccgccggcgccgtttcctaccaagtgttcggagaatttgctggcaacggtatctggaaaggggtcgattatggcgagaaagacttctatgtgtttgatattctgatcaatgcggaatcaggagacaacacgtacctgactgattatgaaatgcaggacttctgtaatgaatgtgggtttaagatggcaccaatgcttggtcgcggcacattcgatagcctgattatgattccgaacgatttcgattcggttctcatggcttacaatgcactggcgaaagaggacctggtaaaagcgaacaacagcgtctttgatgccaatgtgatcggtgataacactgctgaaggctatgttcttaaaccgtgtgaacccaaatggttaccgaatgggacgcgtgtggcgatcaaatgcaagaactccaaattcagcgagaagaagaaaagtgacaaaccgatcaagacacaaggcccactgacggaaattgataagaatctgctggacgtattggcctgttatgtcactttaaaccgcgtgaacaacgtgatctctaagattggaacagtgacgccgagcgattttgagaaagtaatgtggctgactgttcaggatattctggaagaaacgtcacgtgagggtattgttctgacgacatcggacaatcctgacctcgtcaagaaagaacttgtccgcatggtgcaggatgagttaaaatcggcatggcgcgaactggtgtcg

SEQ ID NO: 888 - protein, 343 aa, synthetic construct
  REGION 1..343: note = variant of RNA ligase 2 from Escherichia phage RB69 (Bacteriophage RB69)
MHHHHHHGGSGMFKKYSSLENHYNSKFIEKLYANGLTDGVWVAREKIHGTNFSLIIERDNVTCAKRTGPIKPTETFYGYEIVLKKYDKAIKTVQKSMYTAGAVSYQVFGEFAGNGIWKGVDYGEKDFYVFDILINAESGDNTYLTDYEMQDFCNECGFKMAPMLGRGTFDSLIMIPNDFDSVLMAYNALAKEDLVKANNSVFDANVIGDNTAEGYVLKPCEPKWLPNGTRVAIKCKNSKFSEKKKSDKPIKTQGPLTEIDKNLLDVLACYVTLNRVNNVISKIGTVTPSDFEKVMWLTVQDILEETSREGIVLTTSDNPDLVKKELVRMVQDELKSAWRELVS

SEQ ID NO: 889 - DNA, 1029 bp, synthetic construct
  misc_feature 1..1029: note = variant of RNA ligase 2 from Escherichia phage RB69 (Bacteriophage RB69)
  source 1..1029: mol_type = other DNA
atgcatcaccatcaccatcacggtggcagcggtatgtttaagaaatattctagtctggaaaaccattacaatagcaaattcattgagaaactctatgctaacggcttaactgatggtgtatgggttgcgcgcgaaaagatccacgggacgaacttttcgctgattatcgagcgtgataatgtaacatgcgccaaacgtacaggcccgattaagcctaccgaaaccttctacggttatgaaatcgtcctgaagaaatacgataaagcgattaagacggtgcagaaatctatgtataccgccggcgccgtttcctaccaagtgttcggagaatttgctggcaacggtatctggaaaggggtcgattatggcgagaaagacttctatgtgtttgatattctgatcaatgcggaatcaggagacaacacgtacctgactgattatgaaatgcaggacttctgtaatgaatttgggtttaagatggcaccaatgcttggtcgcggcacattcgatagcctgattatgattccgaacgatttcgattcggttctcatggcttacaatgcactggcgaaagaggacctggtaaaagcgaacaactgcgtctttgatgccaatgtgatcggtgataacactgctgaaggctatgttcttaaaccgtgtgaacccaaatggttaccgaatgggacgcgtgtggcgatcaaatgcaagaactccaaattcagcgagaagaagaaaagtgacaaaccgatcaagacacaagtcccactgacggaaattgataagaatctgctggacgtattggcctgttatgtcactttaaaccgcgtgaacaacgtgatctctaagattggaacagtgacgccgagcgattttgagaaagtaatgtggctgactgttcaggatattctggaagaaacgtcacgtgagggtattgttctgacgacatcggacaatcctgacctcgtcaagaaagaacttgtccgcatggtgcaggatgagttaaaatcggcatggcgcgaactggtgtcg

SEQ ID NO: 890 - protein, 343 aa, synthetic construct
  REGION 1..343: note = variant of RNA ligase 2 from Escherichia phage RB69 (Bacteriophage RB69)
MHHHHHHGGSGMFKKYSSLENHYNSKFIEKLYANGLTDGVWVAREKIHGTNFSLIIERDNVTCAKRTGPIKPTETFYGYEIVLKKYDKAIKTVQKSMYTAGAVSYQVFGEFAGNGIWKGVDYGEKDFYVFDILINAESGDNTYLTDYEMQDFCNEFGFKMAPMLGRGTFDSLIMIPNDFDSVLMAYNALAKEDLVKANNCVFDANVIGDNTAEGYVLKPCEPKWLPNGTRVAIKCKNSKFSEKKKSDKPIKTQVPLTEIDKNLLDVLACYVTLNRVNNVISKIGTVTPSDFEKVMWLTVQDILEETSREGIVLTTSDNPDLVKKELVRMVQDELKSAWRELVS

SEQ ID NO: 891 - DNA, 1029 bp, synthetic construct
  misc_feature 1..1029: note = variant of RNA ligase 2 from Escherichia phage RB69 (Bacteriophage RB69)
  source 1..1029: mol_type = other DNA
atgcatcaccatcaccatcacggtggcagcggtatgtttaagaaatattctagtctggaaaaccattacaatagcaaattcattgagaaactctatgctaacggcttaactgatggtgtatgggttgcgcgcgaaaagatccacgggacgaacttttcgctgattatcgagcgtgataatgtaacatgcgccaaacgtacaggcccgattaagcctaccgaaaccttctacggttatgaaatcgtcctgaagaaatacgataaagcgattaagacggtgcagaaatctatgtataccgccggcgccgtttcctaccaagtgttcggagaatttgctggcaacggtatctggaaaggggtcgattatggcgagaaagacttctatgtgtttgatattctgatcaatgcggaatcaggagacaacacgtacctgactgattatgaaatgcaggacttctgtaatgaatatgggtttaagatggcaccaatgcttggtcgcggcacattcgatagcctgattatgattccgaacgatttcgattcggttctcatggcttacaatgcagtggcgaaagaggacctggtaaaagcgaacaactgcgtctttgatgccaatgtgatcggtgataacactgctgaaggctatgttcttaaaccgtgtgaacccaaatggttaccgaatgggacgcgtgtggcgatcaaatgcaagaactccaaattcagcgagaagaagaaaagtgacaaaccgatcaagacacaagtcccactgacggaaattgataagaatctgctggacgtattggcctgttatgtcactttaaaccgcgtgaacaacgtgatctctaagattggaacagtgacgccgagcgattttgagaaagtaatgtggctgactgttcaggatattctggaagaaacgtcacgtgagggtattgttctgacgacatcggacaatcctgacctcgtcaagaaagaacttgtccgcatggtgcaggatgtgttagaatcggcatggcgcgaactggtgtcg

SEQ ID NO: 892 - protein, 343 aa, synthetic construct
  REGION 1..343: note = variant of RNA ligase 2 from Escherichia phage RB69 (Bacteriophage RB69)
MHHHHHHGGSGMFKKYSSLENHYNSKFIEKLYANGLTDGVWVAREKIHGTNFSLIIERDNVTCAKRTGPIKPTETFYGYEIVLKKYDKAIKTVQKSMYTAGAVSYQVFGEFAGNGIWKGVDYGEKDFYVFDILINAESGDNTYLTDYEMQDFCNEYGFKMAPMLGRGTFDSLIMIPNDFDSVLMAYNAVAKEDLVKANNCVFDANVIGDNTAEGYVLKPCEPKWLPNGTRVAIKCKNSKFSEKKKSDKPIKTQVPLTEIDKNLLDVLACYVTLNRVNNVISKIGTVTPSDFEKVMWLTVQDILEETSREGIVLTTSDNPDLVKKELVRMVQDVLESAWRELVS

SEQ ID NO: 893 - DNA, 1029 bp, synthetic construct
  misc_feature 1..1029: note = variant of RNA ligase 2 from Escherichia phage RB69 (Bacteriophage RB69)
  source 1..1029: mol_type = other DNA
atgcatcaccatcaccatcacggtggcagcggtatgtttaagaaatattctagtctggaaaaccattacaatgcgaaattcattgagaaactctatgctaacggcttaactgatggtgtatgggttgcgcgcgaaaagatccacgggacgaacttttcgctgattatcgagcgtgataatgtaacatgcgccaaacgtacaggcccgattaagcctaccgaaaccttctacggttatgaaatcgtcctgaagaaatacgataaagcgattaagacggtgcagaaatctatgtataccgccggcgccgtttcctaccaagtgttcggagaatttgctggcaacggtatctggaaaggggtcgattatggcgagaaagacttctatgtgtttgatattctgatcaatgcggaatcaggagacaacacgtacctgactgattatgaaatgcaggacttctgtaatgaatatgggtttaagatggcaccaatgcttggtcgcggcacattcgatagcctgattatgattccgaacgatttcgattcggttctcatggcttacaatgcactggcgaaagaggacctggtaaaagcgaacaactgcgtctttgatgccaatgtgatcggtgataacactgctgaaggctatgttcttaaaccgtgtgaacccaaatggttaccgaatgggacgcgtgtggcgatcaaatgcaagaactccaaattcagcgagaagaagaaaagtgacaaaccgatcaagacacaagtcccactgacggaaattgataagaatctgctggacgtattggcctgttatgtcactttaaaccgcgtgaacaacgtgatctctaagattggaacagtgacgccgagcgattttgagaaagtaatgtggctgactgttcaggatattctggaagaaacgtcacgtgagggtattgttctgacgacatcggacaatcctgacctcgtcaagaaagaacttgtccgcatggtgcaggatgtgttaaaatcggcatggcgcgaactggtgtcg

SEQ ID NO: 894 - protein, 343 aa, synthetic construct
  REGION 1..343: note = variant of RNA ligase 2 from Escherichia phage RB69 (Bacteriophage RB69)
MHHHHHHGGSGMFKKYSSLENHYNAKFIEKLYANGLTDGVWVAREKIHGTNFSLIIERDNVTCAKRTGPIKPTETFYGYEIVLKKYDKAIKTVQKSMYTAGAVSYQVFGEFAGNGIWKGVDYGEKDFYVFDILINAESGDNTYLTDYEMQDFCNEYGFKMAPMLGRGTFDSLIMIPNDFDSVLMAYNALAKEDLVKANNCVFDANVIGDNTAEGYVLKPCEPKWLPNGTRVAIKCKNSKFSEKKKSDKPIKTQVPLTEIDKNLLDVLACYVTLNRVNNVISKIGTVTPSDFEKVMWLTVQDILEETSREGIVLTTSDNPDLVKKELVRMVQDVLKSAWRELVS

SEQ ID NO: 895 - DNA, 1029 bp, synthetic construct
  misc_feature 1..1029: note = variant of RNA ligase 2 from Escherichia phage RB69 (Bacteriophage RB69)
  source 1..1029: mol_type = other DNA
atgcatcaccatcaccatcacggtggcagcggtatgtttaagaaatattctagtctggaaaaccattacaatagcaaattcattgagaaactctatgctaacggcttaactgatggtgtatgggttgcgcgcgaaaagatccacgggacgaacttttcgctgattatcgagcgtgataatgtaacatgcgccaaacgtacaggcccgattaagcctaccgaaaccttctacggttatgaaatcgtcctgaagaaatacgataaagcgattaagacggtgcagaaatctatgtataccgccggcgccgtttcctaccaagtgttcggagaatttgctggcaacggtatctggaaaggggtcgattatggcgagaaagacttctatgtgtttgatattctgatcaatgcggaatcaggagacaacacgtacctgactgattatgaaatgcaggacttctgtaatgaatatgggtttaagatggcaccaatgcttggtcgcggcacattcgatagcctgattatgattccgaacgatttcgattcggttctcatggcttacaatgcagtggcgaaagaggacctggtaaaagcgaacaactgcgtctttgatgccaatcgcatcggtgataacactgctgaaggctatgttcttaaaccgtgtgaacccaaatggttaccgaatgggacgcgtgtggcgatcaaatgcaagaactccaaattcagcgagaagaagaaaagtgacaaaccgatcaagacacaagtcccactgacggaaattgataagaatctgctggacgtattggcctgttatgtcactttaaaccgcgtgaacaacgtgatctctaagattggaacagtgacgccgaaagattttgagaaagtaatgtggctgactgttcaggatattctggaagaaacgtcacgtgagggtattgttctgacgacatcggacaatcctgacctcgtcaagaaagaacttgtccgcatggtgcaggatgagttagaatcggcatggcgcgaactggtgtcg

SEQ ID NO: 896 - protein, 343 aa, synthetic construct
  REGION 1..343: note = variant of RNA ligase 2 from Escherichia phage RB69 (Bacteriophage RB69)
MHHHHHHGGSGMFKKYSSLENHYNSKFIEKLYANGLTDGVWVAREKIHGTNFSLIIERDNVTCAKRTGPIKPTETFYGYEIVLKKYDKAIKTVQKSMYTAGAVSYQVFGEFAGNGIWKGVDYGEKDFYVFDILINAESGDNTYLTDYEMQDFCNEYGFKMAPMLGRGTFDSLIMIPNDFDSVLMAYNAVAKEDLVKANNCVFDANRIGDNTAEGYVLKPCEPKWLPNGTRVAIKCKNSKFSEKKKSDKPIKTQVPLTEIDKNLLDVLACYVTLNRVNNVISKIGTVTPKDFEKVMWLTVQDILEETSREGIVLTTSDNPDLVKKELVRMVQDELESAWRELVS

SEQ ID NO: 897 - DNA, 1029 bp, synthetic construct
  misc_feature 1..1029: note = variant of RNA ligase 2 from Escherichia phage RB69 (Bacteriophage RB69)
  source 1..1029: mol_type = other DNA
atgcatcaccatcaccatcacggtggcagcggtatgtttaagaaatattctagtctggaaaaccattacaatagcaaattcattgaaaaactctatgctaacggcttaactgatggtgtatgggttgcgcgcgaaaagatccacgggacgaacttttcgctgattatcgagcgtgataatgtaacatgcgccaaacgtacaggcccgattaagcctaccgaaaccttctacggttatgaaatcgtcctgaagaaatacgataaagcgattaagacggtgcagaaatctatgtataccgccggcgccgtttcctaccaagtgttcggagaatttgctggcaacggtatctggaaaggggtcgattatggcgagaaagacttctatgtgtttgatattctgatcaatgcggaatcaggagacaacacgtacctgactgattatgaaatgcaggacttctgtaatgaatgtgggtttaagatggcaccaatgcttggtcgcggcacattcgatagcctgattatgattccgaacgatttcgattcggttctcatggcttacaatgcaaccgcgaaagaggacctggtaaaagcgaacaactgcgtctttgatgccaatgtgatcggtgataacactgctgaaggctatgttcttaaaccgtgtgaacccaaatggttaccgaatgggacgcgtgtggcgatcaaatgcaagaactccaaattcagcgagaagaagaaaagtgacaaaccgatcaagacacaagtcccactgacggaaattgataagaatctgctggacgtattggcctgttatgtcactttaaaccgcgtgaacaacgtgatctctaagattggaacagtgacgccgagcgattttgagaaagtaatgtggctgactgttcaggatattctggaagaaacgtcacgtgagggtattgttctgacgacatcggacaatcctgacctcgtcaagaaagaacttgtccgcatggtgcaggatgagttagaatcggcatggcgcgaactggtgtcg

SEQ ID NO: 898 - protein, 343 aa, synthetic construct
  REGION 1..343: note = variant of RNA ligase 2 from Escherichia phage RB69 (Bacteriophage RB69)
MHHHHHHGGSGMFKKYSSLENHYNSKFIEKLYANGLTDGVWVAREKIHGTNFSLIIERDNVTCAKRTGPIKPTETFYGYEIVLKKYDKAIKTVQKSMYTAGAVSYQVFGEFAGNGIWKGVDYGEKDFYVFDILINAESGDNTYLTDYEMQDFCNECGFKMAPMLGRGTFDSLIMIPNDFDSVLMAYNATAKEDLVKANNCVFDANVIGDNTAEGYVLKPCEPKWLPNGTRVAIKCKNSKFSEKKKSDKPIKTQVPLTEIDKNLLDVLACYVTLNRVNNVISKIGTVTPSDFEKVMWLTVQDILEETSREGIVLTTSDNPDLVKKELVRMVQDELESAWRELVS

SEQ ID NO: 899 - DNA, 1029 bp, synthetic construct
  misc_feature 1..1029: note = variant of RNA ligase 2 from Escherichia phage RB69 (Bacteriophage RB69)
  source 1..1029: mol_type = other DNA
atgcatcaccatcaccatcacggtggcagcggtatgtttaagaaatattctagtctggaaaaccattacaatagcaaattcattgagaaactctatgctaacggcttaactgatggtgtatgggttgcgcgcgaaaagatccacgggacgaacttttcgctgattatcgagcgtgataatgtaacatgcgccaaacgtacaggcccgattaagcctaccgaaaccttctacggttatgaaatcgtcctgaagaaatacgataaagcgattaagacggtgcagaaatctatgtataccgccggcgccgtttcctaccaagtgttcggagaatttgctggcaacggtatctggaaaggggtcgattatggcgagaaagacttctatgtgtttgatattctgatcaatgcggaatcaggagacaacacgtacctgactgattatgaaatgcaggacttctgtaatgaatgtgggtttaagatggcaccaatgcttggtcgcggcacattcgatagcctgattatgattccgaacgatttcgattcggttctcatggcttacaatgcagtggcgaaagaggacctggtaaaagcgaacaacagcgtctttgatgccaatgtgatcggtgataacactgctgaaggctatgttcttaaaccgtgtgaacccaaatggttaccgaatgggacgcgtgtggcgatcaaatgcaagaactccaaattcagcgagaagaagaaaagtgacaaaccgatcaagacacaagtcccactgacggaaattgataagaatctgctggacgtattggcctgttatgtcactttaaaccgcgtgaacaacgtgatctctaagattggaacagtgacgccgagcgattttgagaaagtaatgtggctgactgttcaggatattctggaagaaacgtcacgtgagggtattgttctgacgacatcggacaatcctgacctcgtcaagaaagaacttgtccgcatggtgcaggatgtgttaaaatcggcatggcgcgaactggtgtcg

SEQ ID NO: 900 - protein, 343 aa, synthetic construct
  REGION 1..343: note = variant of RNA ligase 2 from Escherichia phage RB69 (Bacteriophage RB69)
MHHHHHHGGSGMFKKYSSLENHYNSKFIEKLYANGLTDGVWVAREKIHGTNFSLIIERDNVTCAKRTGPIKPTETFYGYEIVLKKYDKAIKTVQKSMYTAGAVSYQVFGEFAGNGIWKGVDYGEKDFYVFDILINAESGDNTYLTDYEMQDFCNECGFKMAPMLGRGTFDSLIMIPNDFDSVLMAYNAVAKEDLVKANNSVFDANVIGDNTAEGYVLKPCEPKWLPNGTRVAIKCKNSKFSEKKKSDKPIKTQVPLTEIDKNLLDVLACYVTLNRVNNVISKIGTVTPSDFEKVMWLTVQDILEETSREGIVLTTSDNPDLVKKELVRMVQDVLKSAWRELVS

SEQ ID NO: 901 - DNA, 1029 bp, synthetic construct
  misc_feature 1..1029: note = variant of RNA ligase 2 from Escherichia phage RB69 (Bacteriophage RB69)
  source 1..1029: mol_type = other DNA
atgcatcaccatcaccatcacggtggcagcggtatgtttaagaaatattctagtctggaaaaccattacaatagcaaattcattgagaaactctatgctaacggcttaactgatggtgtatgggttgcgcgcgaaaagatccacgggacgaacttttcgctgattatcgagcgtgataatgtaacatgcgccaaacgtacaggcccgattaagcctaccgaaaccttctacggttatgaaatcgtcctgaagaaatacgataaagcgattaagacggtgcagaaatctatgtataccgccggcgccgtttcctaccaagtgttcggagaatttgctggcaacggtatctggaaaggggtcgattatggcgagaaagacttctatgtgtttgatattctgatcaatgcggaatcaggagacaacacgtacctgactgattatgaaatgcaggacttctgtaatgaatttgggtttaagatggcaccaatgcttggtcgcggcacattcgatagcctgattatgattccgaacgatttcgattcggttctcatggcttacaatgcaaccgcgaaagaggacctggtaaaagcgaacaactgcgtctttgatgccaatgtgatcggtgataacactgctgaaggctatgttcttaaaccgtgtgaacccaaatggttaccgaatgggacgcgtgtggcgatcaaatgcaagaactccaaattcagcgagaagaagaaaagtgacaaaccgatcaagacacaaggcccactgacggaaattgataagaatctgctggacgtattggcctgttatgtcactttaaaccgcgtgaacaacgtgatctctaagattggaacagtgacgccgaaagattttgagaaagtaatgtggctgactgttcaggatattctggaagaaacgtcacgtgagggtattgttctgacgacatcggacaatcctgacctcgtcaagaaagaacttgtccgcatggtgcaggatgagttaaaatcggcatggcgcgaactggtgtcg

SEQ ID NO: 902 - protein, 343 aa, synthetic construct
  REGION 1..343: note = variant of RNA ligase 2 from Escherichia phage RB69 (Bacteriophage RB69)
MHHHHHHGGSGMFKKYSSLENHYNSKFIEKLYANGLTDGVWVAREKIHGTNFSLIIERDNVTCAKRTGPIKPTETFYGYEIVLKKYDKAIKTVQKSMYTAGAVSYQVFGEFAGNGIWKGVDYGEKDFYVFDILINAESGDNTYLTDYEMQDFCNEFGFKMAPMLGRGTFDSLIMIPNDFDSVLMAYNATAKEDLVKANNCVFDANVIGDNTAEGYVLKPCEPKWLPNGTRVAIKCKNSKFSEKKKSDKPIKTQGPLTEIDKNLLDVLACYVTLNRVNNVISKIGTVTPKDFEKVMWLTVQDILEETSREGIVLTTSDNPDLVKKELVRMVQDELKSAWRELVS

SEQ ID NO: 903 - DNA, 1029 bp, synthetic construct
  misc_feature 1..1029: note = variant of RNA ligase 2 from Escherichia phage RB69 (Bacteriophage RB69)
  source 1..1029: mol_type = other DNA
atgcatcaccatcaccatcacggtggcagcggtatgtttaagaaatattctagtctggaaaaccattacaatagcaaattcattgagaaactctatgctaacggcttaactgatggtgtatgggttgcgcgcgaaaagatccacgggacgaacttttcgctgattatcgagcgtgataatgtaacatgcgccaaacgtacaggcccgattaagcctaccgaaaccttctacggttatgaaatcgtcctgaagaaatacgataaagcgattaagacggtgcagaaatctatgtataccgccggcgccgtttcctaccaagtgttcggagaatttgctggcaacggtatctggaaaggggtcgattatggcgagaaagacttctatgtgtttgatattctgatcaatgcggaatcaggagacaacacgtacctgactgattatgaaatgcaggacttctgtaatgaatatgggtttaagatggcaccaatgcttggtcgcggcacattcgatagcctgattatgattccgaacgatttcgattcggttctcatggcttacaatgcaacggcgaaagaggacctggtaaaagcgaacaactgcgtctttgatgccaatgtgatcggtgataacactgctgaaggctatgttcttaaaccgtgtgaacccaaatggttaccgaatgggacgcgtgtggcgatcaaatgcaagaactccaaattcagcgagaagaagaaaagtgacaaaccgatcaagacacaagtcccactgacggaaattgataagaatctgctggacgtattggcctgttatgtcactttaaaccgcgtgaacaacgtgatctctaagattggaacagtgacgccgaccgattttgagaaagtaatgtggctgactgttcaggatattctggaagaaacgtcacgtgagggtattgttctgacgacatcggacaatcctgacctcgtcaagaaagaacttgtccgcatggtgcaggatgagttagaatcggcatggcgcgaactggtgtcg

SEQ ID NO: 904 - protein, 343 aa, synthetic construct
  REGION 1..343: note = variant of RNA ligase 2 from Escherichia phage RB69 (Bacteriophage RB69)
MHHHHHHGGSGMFKKYSSLENHYNSKFIEKLYANGLTDGVWVAREKIHGTNFSLIIERDNVTCAKRTGPIKPTETFYGYEIVLKKYDKAIKTVQKSMYTAGAVSYQVFGEFAGNGIWKGVDYGEKDFYVFDILINAESGDNTYLTDYEMQDFCNEYGFKMAPMLGRGTFDSLIMIPNDFDSVLMAYNATAKEDLVKANNCVFDANVIGDNTAEGYVLKPCEPKWLPNGTRVAIKCKNSKFSEKKKSDKPIKTQVPLTEIDKNLLDVLACYVTLNRVNNVISKIGTVTPTDFEKVMWLTVQDILEETSREGIVLTTSDNPDLVKKELVRMVQDELESAWRELVS

SEQ ID NO: 905 - DNA, 1029 bp, synthetic construct
  misc_feature 1..1029: note = variant of RNA ligase 2 from Escherichia phage RB69 (Bacteriophage RB69)
  source 1..1029: mol_type = other DNA
atgcatcaccatcaccatcacggtggcagcggtatgtttaagaaatattctagtctggaaaaccattacaatagcaaattcattgagaaactctatgctaacggcttaactgatggtgtatgggttgcgcgcgaaaagatccacgggacgaacttttcgctgattatcgagcgtgataatgtaacatgcgccaaacgtacaggcccgattaagcctaccgaaaccttctacggttatgaaatcgtcctgaagaaatacgataaagcgattaagacggtgcagaaatctatgtataccgccggcgccgtttcctaccaagtgttcggagaatttgctggcaacggtatctggaaaggggtcgattatggcgagaaagacttctatgtgtttgatattctgatcaatgcggaatcaggagacaacacgtacctgactgattatgaaatgcaggacttctgtaatgaatgtgggtttaagatggcaccaatgcttggtcgcggcacattcgatagcctgattatgattccgaacgatttcgattcggttctcatggcttacaatgcaacggcgaaagaggacctggtaaaagcgaacaactgcgtctttgatgccaatgtgatcggtgataacactgctgaaggctatgttcttaaaccgtgtgaacccaaatggttaccgaatgggacgcgtgtggcgatcaaatgcaagaactccaaattcagcgagaagaagaaaagtgacaaaccgatcaagacacaaggcccactgacggaaattgataagaatctgctggacgtattggcctgttatgtcactttaaaccgcgtgaacaacgtgatctctaagattggaacagtgacgccgaccgattttgagaaagtaatgtggctgactgttcaggatattctggaagaaacgtcacgtgagggtattgttctgacgacatcggacaatcctgacctcgtcaagaaagaacttgtccgcatggtgcaggatgtgttaaaatcggcatggcgcgaactggtgtcg

SEQ ID NO: 906 - protein, 343 aa, synthetic construct
  REGION 1..343: note = variant of RNA ligase 2 from Escherichia phage RB69 (Bacteriophage RB69)
MHHHHHHGGSGMFKKYSSLENHYNSKFIEKLYANGLTDGVWVAREKIHGTNFSLIIERDNVTCAKRTGPIKPTETFYGYEIVLKKYDKAIKTVQKSMYTAGAVSYQVFGEFAGNGIWKGVDYGEKDFYVFDILINAESGDNTYLTDYEMQDFCNECGFKMAPMLGRGTFDSLIMIPNDFDSVLMAYNATAKEDLVKANNCVFDANVIGDNTAEGYVLKPCEPKWLPNGTRVAIKCKNSKFSEKKKSDKPIKTQGPLTEIDKNLLDVLACYVTLNRVNNVISKIGTVTPTDFEKVMWLTVQDILEETSREGIVLTTSDNPDLVKKELVRMVQDVLKSAWRELVS

SEQ ID NO: 907 - DNA, 1029 bp, synthetic construct
  misc_feature 1..1029: note = variant of RNA ligase 2 from Escherichia phage RB69 (Bacteriophage RB69)
  source 1..1029: mol_type = other DNA
atgcatcaccatcaccatcacggtggcagcggtatgtttaagaaatattctagtctggaaaaccattacaatagcaaattcattgagaaactctatgctaacggcttaactgatggtgtatgggttgcgcgcgaaaagatccacgggacgaacttttcgctgattatcgagcgtgataatgtaacatgcgccaaacgtacaggcccgattaagcctaccgaaaccttctacggttatgaaatcgtcctgaagaaatacgataaagcgattaagacggtgcagaaatctatgtataccgccggcgccgtttcctaccaagtgttcggagaatttgctggcaacggtatctggaaaggggtcgattatggcgagaaagacttctatgtgtttgatattctgatcaatgcggaatcaggagacaacacgtacctgactgattatgaaatgcaggacttctgtaatgaatgtgggtttaagatggcaccaatgcttggtcgcggcacattcgatagcctgattatgattccgaacgatttcgattcggttctcatggcttacaatgcaaccgcgaaagaggacctggtaaaagcgaacaacagcgtctttgatgccaatgtgatcggtgataacactgctgaaggctatgttcttaaaccgtgtgaacccaaatggttaccgaatgggacgcgtgtggcgatcaaatgcaagaactccaaattcagcgagaagaagaaaagtgacaaaccgatcaagacacaagtcccactgacggaaattgataagaatctgctggacgtattggcctgttatgtcactttaaaccgcgtgaacaacgtgatctctaagattggaacagtgacgccgaccgattttgagaaagtaatgtggctgactgttcaggatattctggaagaaacgtcacgtgagggtattgttctgacgacatcggacaatcctgacctcgtcaagaaagaacttgtccgcatggtgcaggatgagttaaaatcggcatggcgcgaactggtgtcg

SEQ ID NO: 908 - protein, 343 aa, synthetic construct
  REGION 1..343: note = variant of RNA ligase 2 from Escherichia phage RB69 (Bacteriophage RB69)
MHHHHHHGGSGMFKKYSSLENHYNSKFIEKLYANGLTDGVWVAREKIHGTNFSLIIERDNVTCAKRTGPIKPTETFYGYEIVLKKYDKAIKTVQKSMYTAGAVSYQVFGEFAGNGIWKGVDYGEKDFYVFDILINAESGDNTYLTDYEMQDFCNECGFKMAPMLGRGTFDSLIMIPNDFDSVLMAYNATAKEDLVKANNSVFDANVIGDNTAEGYVLKPCEPKWLPNGTRVAIKCKNSKFSEKKKSDKPIKTQVPLTEIDKNLLDVLACYVTLNRVNNVISKIGTVTPTDFEKVMWLTVQDILEETSREGIVLTTSDNPDLVKKELVRMVQDELKSAWRELVS

SEQ ID NO: 909 - DNA, 1029 bp, synthetic construct
  misc_feature 1..1029: note = variant of RNA ligase 2 from Escherichia phage RB69 (Bacteriophage RB69)
  source 1..1029: mol_type = other DNA
atgcatcaccatcaccatcacggtggcagcggtatgtttaagaaatattctagtctggaaaaccattacaatagcaaattcattgaaaaactctatgctaacggcttaactgatggtgtatgggttgcgcgcgaaaagatccacgggacgaacttttcgctgattatcgagcgtgataatgtaacatgcgccaaacgtacaggcccgattaagcctaccgaaaccttctacggttatgaaatcgtcctgaagaaatacgataaagcgattaagacggtgcagaaatctatgtataccgccggcgccgtttcctaccaagtgttcggagaatttgctggcaacggtatctggaaaggggtcgattatggcgagaaagacttctatgtgtttgatattctgatcaatgcggaatcaggagacaacacgtacctgactgattatgaaatgcaggacttctgtaatgaatatgggtttaagatggcaccaatgcttggtcgcggcacattcgatagcctgattatgattccgaacgatttcgattcggttctcatggcttacaatgcagtggcgaaagaggacctggtaaaagcgaacaacagcgtctttgatgccaatgtgatcggtgataacactgctgaaggctatgttcttaaaccgtgtgaacccaaatggttaccgaatgggacgcgtgtggcgatcaaatgcaagaactccaaattcagcgagaagaagaaaagtgacaaaccgatcaagacacaagtcccactgacggaaattgataagaatctgctggacgtattggcctgttatgtcactttaaaccgcgtgaacaacgtgatctctaagattggaacagtgacgccgcatgattttgagaaagtaatgtggctgactgttcaggatattctggaagaaacgtcacgtgagggtattgttctgacgacatcggacaatcctgacctcgtcaagaaagaacttgtccgcatggtgcaggatgtgttaaaatcggcatggcgcgaactggtgtcg

SEQ ID NO: 910 - protein, 343 aa, synthetic construct
  REGION 1..343: note = variant of RNA ligase 2 from Escherichia phage RB69 (Bacteriophage RB69)
MHHHHHHGGSGMFKKYSSLENHYNSKFIEKLYANGLTDGVWVAREKIHGTNFSLIIERDNVTCAKRTGPIKPTETFYGYEIVLKKYDKAIKTVQKSMYTAGAVSYQVFGEFAGNGIWKGVDYGEKDFYVFDILINAESGDNTYLTDYEMQDFCNEYGFKMAPMLGRGTFDSLIMIPNDFDSVLMAYNAVAKEDLVKANNSVFDANVIGDNTAEGYVLKPCEPKWLPNGTRVAIKCKNSKFSEKKKSDKPIKTQVPLTEIDKNLLDVLACYVTLNRVNNVISKIGTVTPHDFEKVMWLTVQDILEETSREGIVLTTSDNPDLVKKELVRMVQDVLKSAWRELVS

SEQ ID NO: 911 - DNA, 1029 bp, synthetic construct
  misc_feature 1..1029: note = variant of RNA ligase 2 from Escherichia phage RB69 (Bacteriophage RB69)
  source 1..1029: mol_type = other DNA
atgcatcaccatcaccatcacggtggcagcggtatgtttaagaaatattctagtctggaaaaccattacaatagcaaattcattgagaaactctatgctaacggcttaactgatggtgtatgggttgcgcgcgaaaagatccacgggacgaacttttcgctgattatcgagcgtgataatgtaacatgcgccaaacgtacaggcccgattaagcctaccgaaaccttctacggttatgaaatcgtcctgaagaaatacgataaagcgattaagacggtgcagaaatctatgtataccgccggcgccgtttcctaccaagtgttcggagaatttgctggcaacggtatctggaaaggggtcgattatggcgagaaagacttctatgtgtttgatattctgatcaatgcggaatcaggagacaacacgtacctgactgattatgaaatgcaggacttctgtaatgaatatgggtttaagatggcaccaatgcttggtcgcggcacattcgatagcctgattatgattccgaacgatttcgattcggttctcatggcttacaatgcaaccgcgaaagaggacctggtaaaagcgaacaactgcgtctttgatgccaatgtgatcggtgataacactgctgaaggctatgttcttaaaccgtgtgaacccaaatggttaccgaatgggacgcgtgtggcgatcaaatgcaagaactccaaattcagcgagaagaagaaaagtgacaaaccgatcaagacacaaggcccactgacggaaattgataagaatctgctggacgtattggcctgttatgtcactttaaaccgcgtgaacaacgtgatctctaagattggaacagtgacgccgcatgattttgagaaagtaatgtggctgactgttcaggatattctggaagaaacgtcacgtgagggtattgttctgacgacatcggacaatcctgacctcgtcaagaaagaacttgtccgcatggtgcaggatgagttagaatcggcatggcgcgaactggtgtcg

SEQ ID NO: 912 - protein, 343 aa, synthetic construct
  REGION 1..343: note = variant of RNA ligase 2 from Escherichia phage RB69 (Bacteriophage RB69)
MHHHHHHGGSGMFKKYSSLENHYNSKFIEKLYANGLTDGVWVAREKIHGTNFSLIIERDNVTCAKRTGPIKPTETFYGYEIVLKKYDKAIKTVQKSMYTAGAVSYQVFGEFAGNGIWKGVDYGEKDFYVFDILINAESGDNTYLTDYEMQDFCNEYGFKMAPMLGRGTFDSLIMIPNDFDSVLMAYNATAKEDLVKANNCVFDANVIGDNTAEGYVLKPCEPKWLPNGTRVAIKCKNSKFSEKKKSDKPIKTQGPLTEIDKNLLDVLACYVTLNRVNNVISKIGTVTPHDFEKVMWLTVQDILEETSREGIVLTTSDNPDLVKKELVRMVQDELESAWRELVS

SEQ ID NO: 913 - DNA, 1029 bp, synthetic construct
  misc_feature 1..1029: note = variant of RNA ligase 2 from Escherichia phage RB69 (Bacteriophage RB69)
  source 1..1029: mol_type = other DNA
atgcatcaccatcaccatcacggtggcagcggtatgtttaagaaatattctagtctggaaaaccattacaatagcaaattcattgagaaactctatgctaacggcttaactgatggtgtatgggttgcgcgcgaaaagatccacgggacgaacttttcgctgattatcgagcgtgataatgtaacatgcgccaaacgtacaggcccgattaagcctaccgaaaccttctacggttatgaaatcgtcctgaagaaatacgataaagcgattaagacggtgcagaaatctatgtataccgccggcgccgtttcctaccaagtgttcggagaatttgctggcaacggtatctggaaaggggtcgattatggcgagaaagacttctatgtgtttgatattctgatcaatgcggaatcaggagacaacacgtacctgactgattatgaaatgcaggacttctgtaatgaatttgggtttaagatggcaccaatgcttggtcgcggcacattcgatagcctgattatgattccgaacgatttcgattcggttctcatggcttacaatgcaaccgcgaaagaggacctggtaaaagcgaacaactgcgtctttgatgccaatgtgatcggtgataacactgctgaaggctatgttcttaaaccgtgtgaacccaaatggttaccgaatgggacgcgtgtggcgatcaaatgcaagaactccaaattcagcgagaagaagaaaagtgacaaaccgatcaagacacaagtcccactgacggaaattgataagaatctgctggacgtattggcctgttatgtcactttaaaccgcgtgaacaacgtgatctctaagattggaacagtgacgccgcatgattttgagaaagtaatgtggctgactgttcaggatattctggaagaaacgtcacgtgagggtattgttctgacgacatcggacaatcctgacctcgtcaagaaagaacttgtccgcatggtgcaggatgtgttaaaatcggcatggcgcgaactggtgtcg

SEQ ID NO: 914 - protein, 343 aa, synthetic construct
  REGION 1..343: note = variant of RNA ligase 2 from Escherichia phage RB69 (Bacteriophage RB69)
MHHHHHHGGSGMFKKYSSLENHYNSKFIEKLYANGLTDGVWVAREKIHGTNFSLIIERDNVTCAKRTGPIKPTETFYGYEIVLKKYDKAIKTVQKSMYTAGAVSYQVFGEFAGNGIWKGVDYGEKDFYVFDILINAESGDNTYLTDYEMQDFCNEFGFKMAPMLGRGTFDSLIMIPNDFDSVLMAYNATAKEDLVKANNCVFDANVIGDNTAEGYVLKPCEPKWLPNGTRVAIKCKNSKFSEKKKSDKPIKTQVPLTEIDKNLLDVLACYVTLNRVNNVISKIGTVTPHDFEKVMWLTVQDILEETSREGIVLTTSDNPDLVKKELVRMVQDVLKSAWRELVS

SEQ ID NO: 915 - DNA, 1029 bp, synthetic construct
  misc_feature 1..1029: note = variant of RNA ligase 2 from Escherichia phage RB69 (Bacteriophage RB69)
  source 1..1029: mol_type = other DNA
atgcatcaccatcaccatcacggtggcagcggtatgtttaagaaatattctagtctggaaaaccattacaatagcaaattcattgagaaactctatgctaacggcttaactgatggtgtatgggttgcgcgcgaaaagatccacgggacgaacttttcgctgattatcgagcgtgataatgtaacatgcgccaaacgtacaggcccgattaagcctaccgaaaccttctacggttatgaaatcgtcctgaagaaatacgataaagcgattaagacggtgcagaaatctatgtataccgccggcgccgtttcctaccaagtgttcggagaatttgctggcaacggtatctggaaaggggtcgattatggcgagaaagacttctatgtgtttgatattctgatcaatgcggaatcaggagacaacacgtacctgactgattatgaaatgcaggacttctgtaatgaatgtgggtttaagatggcaccaatgcttggtcgcggcacattcgatagcctgattatgattccgaacgatttcgattcggttctcatggcttacaatgcaacggcgaaagaggacctggtaaaagcgaacaactgcgtctttgatgccaatgtgatcggtgataacactgctgaaggctatgttcttaaaccgtgtgaacccaaatggttaccgaatgggacgcgtgtggcgatcaaatgcaagaactccaaattcagcgagaagaagaaaagtgacaaaccgatcaagacacaaggcccactgacggaaattgataagaatctgctggacgtattggcctgttatgtcactttaaaccgcgtgaacaacgtgatctctaagattggaacagtgacgccgaaagattttgagaaagtaatgtggctgactgttcaggatattctggaagaaacgtcacgtgagggtattgttctgacgacatcggacaatcctgacctcgtcaagaaagaacttgtccgcatggtgcaggatgtgttagaatcggcatggcgcgaactggtgtcg

SEQ ID NO: 916 - protein, 343 aa, synthetic construct
  REGION 1..343: note = variant of RNA ligase 2 from Escherichia phage RB69 (Bacteriophage RB69)
MHHHHHHGGSGMFKKYSSLENHYNSKFIEKLYANGLTDGVWVAREKIHGTNFSLIIERDNVTCAKRTGPIKPTETFYGYEIVLKKYDKAIKTVQKSMYTAGAVSYQVFGEFAGNGIWKGVDYGEKDFYVFDILINAESGDNTYLTDYEMQDFCNECGFKMAPMLGRGTFDSLIMIPNDFDSVLMAYNATAKEDLVKANNCVFDANVIGDNTAEGYVLKPCEPKWLPNGTRVAIKCKNSKFSEKKKSDKPIKTQGPLTEIDKNLLDVLACYVTLNRVNNVISKIGTVTPKDFEKVMWLTVQDILEETSREGIVLTTSDNPDLVKKELVRMVQDVLESAWRELVS

SEQ ID NO: 917 - DNA, 1029 bp, synthetic construct
  misc_feature 1..1029: note = variant of RNA ligase 2 from Escherichia phage RB69 (Bacteriophage RB69)
  source 1..1029: mol_type = other DNA
atgcatcaccatcaccatcacggtggcagcggtatgtttaagaaatattctagtctggaaaaccattacaatagcaaattcattgagaaactctatgctaacggcttaactgatggtgtatgggttgcgcgcgaaaagatccacgggacgaacttttcgctgattatcgagcgtgataatgtaacatgcgccaaacgtacaggcccgattaagcctaccgaaaccttctacggttatgaaatcgtcctgaagaaatacgataaagcgattaagacggtgcagaaatctatgtataccgccggcgccgtttcctaccaagtgttcggagaatttgctggcaacggtatctggaaaggggtcgattatggcgagaaagacttctatgtgtttgatattctgatcaatgcggaatcaggagacaacacgtacctgactgattatgaaatgcaggacttctgtaatgaatgtgggtttaagatggcaccaatgcttggtcgcggcacattcgatagcctgattatgattccgaacgatttcgattcggttctcatggcttacaatgcaaccgcgaaagaggacctggtaaaagcgaacaacagcgtctttgatgccaatgtgatcggtgataacactgctgaaggctatgttcttaaaccgtgtgaacccaaatggttaccgaatgggacgcgtgtggcgatcaaatgcaagaactccaaattcagcgagaagaagaaaagtgacaaaccgatcaagacacaagtcccactgacggaaattgataagaatctgctggacgtattggcctgttatgtcactttaaaccgcgtgaacaacgtgatctctaagattggaacagtgacgccgaccgattttgagaaagtaatgtggctgactgttcaggatattctggaagaaacgtcacgtgagggtattgttctgacgacatcggacaatcctgacctcgtcaagaaagaacttgtccgcatggtgcaggatgtgttaaaatcggcatggcgcgaactggtgtcg

SEQ ID NO: 918 - protein, 343 aa, synthetic construct
  REGION 1..343: note = variant of RNA ligase 2 from Escherichia phage RB69 (Bacteriophage RB69)
MHHHHHHGGSGMFKKYSSLENHYNSKFIEKLYANGLTDGVWVAREKIHGTNFSLIIERDNVTCAKRTGPIKPTETFYGYEIVLKKYDKAIKTVQKSMYTAGAVSYQVFGEFAGNGIWKGVDYGEKDFYVFDILINAESGDNTYLTDYEMQDFCNECGFKMAPMLGRGTFDSLIMIPNDFDSVLMAYNATAKEDLVKANNSVFDANVIGDNTAEGYVLKPCEPKWLPNGTRVAIKCKNSKFSEKKKSDKPIKTQVPLTEIDKNLLDVLACYVTLNRVNNVISKIGTVTPTDFEKVMWLTVQDILEETSREGIVLTTSDNPDLVKKELVRMVQDVLKSAWRELVS

SEQ ID NO: 919 - DNA, 1029 bp, synthetic construct
  misc_feature 1..1029: note = variant of RNA ligase 2 from Escherichia phage RB69 (Bacteriophage RB69)
  source 1..1029: mol_type = other DNA
atgcatcaccatcaccatcacggtggcagcggtatgtttaagaaatattctagtctggaaaaccattacaatagcaaattcattgagaaactctatgctaacggcttaactgatggtgtatgggttgcgcgcgaaaagatccacgggacgaacttttcgctgattatcgagcgtgataatgtaacatgcgccaaacgtacaggcccgattaagcctaccgaaaccttctacggttatgaaatcgtcctgaagaaatacgataaagcgattaagacggtgcagaaatctatgtataccgccggcgccgtttcctaccaagtgttcggagaatttgctggcaacggtatctggaaaggggtcgattatggcgagaaagacttctatgtgtttgatattctgatcaatgcggaatcaggagacaacacgtacctgactgattatgaaatgcaggacttctgtaatgaatgtgggtttaagatggcaccaatgcttggtcgcggcacattcgatagcctgattatgattccgaacgatttcgattcggttctcatggcttacaatgcaacggcgaaagaggacctggtaaaagcgaacaacagcgtctttgatgccaatgtgatcggtgataacactgctgaaggctatgttcttaaaccgtgtgaacccaaatggttaccgaatgggacgcgtgtggcgatcaaatgcaagaactccaaattcagcgagaagaagaaaagtgacaaaccgatcaagacacaagtcccactgacggaaattgataagaatctgctggacgtattggcctgttatgtcactttaaaccgcgtgaacaacgtgatctctaagattggaacagtgacgccgagcgattttgagaaagtaatgtggctgactgttcaggatattctggaagaaacgtcacgtgagggtattgttctgacgacatcggacaatcctgacctcgtcaagaaagaacttgtccgcatggtgcaggatgtgttaaaatcggcatggcgcgaactggtgtcg

SEQ ID NO: 920 - protein, 343 aa, synthetic construct
  REGION 1..343: note = variant of RNA ligase 2 from Escherichia phage RB69 (Bacteriophage RB69)
MHHHHHHGGSGMFKKYSSLENHYNSKFIEKLYANGLTDGVWVAREKIHGTNFSLIIERDNVTCAKRTGPIKPTETFYGYEIVLKKYDKAIKTVQKSMYTAGAVSYQVFGEFAGNGIWKGVDYGEKDFYVFDILINAESGDNTYLTDYEMQDFCNECGFKMAPMLGRGTFDSLIMIPNDFDSVLMAYNATAKEDLVKANNSVFDANVIGDNTAEGYVLKPCEPKWLPNGTRVAIKCKNSKFSEKKKSDKPIKTQVPLTEIDKNLLDVLACYVTLNRVNNVISKIGTVTPSDFEKVMWLTVQDILEETSREGIVLTTSDNPDLVKKELVRMVQDVLKSAWRELVS

SEQ ID NO: 921 - DNA, 1029 bp, synthetic construct
  misc_feature 1..1029: note = variant of RNA ligase 2 from Escherichia phage RB69 (Bacteriophage RB69)
  source 1..1029: mol_type = other DNA
atgcatcaccatcaccatcacggtggcagcggtatgtttaagaaatattctagtctggaaaaccattacaatagcaaattcattgaaaaactctatgctaacggcttaactgatggtgtatgggttgcgcgcgaaaagatccacgggacgaacttttcgctgattatcgagcgtgataatgtaacatgcgccaaacgtacaggcccgattaagcctaccgaaaccttctacggttatgaaatcgtcctgaagaaatacgataaagcgattaagacggtgcagaaatctatgtataccgccggcgccgtttcctaccaagtgttcggagaatttgctggcaacggtatctggaaaggggtcgattatggcgagaaagacttctatgtgtttgatattctgatcaatgcggaatcaggagacaacacgtacctgactgattatgaaatgcaggacttctgtaatgaatatgggtttaagatggcaccaatgcttggtcgcggcacattcgatagcctgattatgattccgaacgatttcgattcggttctcatggcttacaatgcaacggcgaaagaggacctggtaaaagcgaacaactgcgtctttgatgccaatcgcatcggtgataacactgctgaaggctatgttcttaaaccgtgtgaacccaaatggttaccgaatgggacgcgtgtggcgatcaaatgcaagaactccaaattcagcgagaagaagaaaagtgacaaaccgatcaagacacaagtcccactgacggaaattgataagaatctgctggacgtattggcctgttatgtcactttaaaccgcgtgaacaacgtgatctctaagattggaacagtgacgccgagcgattttgagaaagtaatgtggctgactgttcaggatattctggaagaaacgtcacgtgagggtattgttctgacgacatcggacaatcctgacctcgtcaagaaagaacttgtccgcatggtgcaggatgtgttaaaatcggcatggcgcgaactggtgtcg

SEQ ID NO: 922 - protein, 343 aa, synthetic construct
  REGION 1..343: note = variant of RNA ligase 2 from Escherichia phage RB69 (Bacteriophage RB69)
MHHHHHHGGSGMFKKYSSLENHYNSKFIEKLYANGLTDGVWVAREKIHGTNFSLIIERDNVTCAKRTGPIKPTETFYGYEIVLKKYDKAIKTVQKSMYTAGAVSYQVFGEFAGNGIWKGVDYGEKDFYVFDILINAESGDNTYLTDYEMQDFCNEYGFKMAPMLGRGTFDSLIMIPNDFDSVLMAYNATAKEDLVKANNCVFDANRIGDNTAEGYVLKPCEPKWLPNGTRVAIKCKNSKFSEKKKSDKPIKTQVPLTEIDKNLLDVLACYVTLNRVNNVISKIGTVTPSDFEKVMWLTVQDILEETSREGIVLTTSDNPDLVKKELVRMVQDVLKSAWRELVS

SEQ ID NO: 923 - DNA, 1029 bp, synthetic construct
  misc_feature 1..1029: note = variant of RNA ligase 2 from Escherichia phage RB69 (Bacteriophage RB69)
  source 1..1029: mol_type = other DNA
atgcatcaccatcaccatcacggtggcagcggtatgtttaagaaatattctagtctggaaaaccattacaatagcaaattcattgagaaactctatgctaacggcttaactgatggtgtatgggttgcgcgcgaaaagatccacgggacgaacttttcgctgattatcgagcgtgataatgtaacatgcgccaaacgtacaggcccgattaagcctaccgaaaccttctacggttatgaaatcgtcctgaagaaatacgataaagcgattaagacggtgcagaaatctatgtataccgccggcgccgtttcctaccaagtgttcggagaatttgctggcaacggtatctggaaaggggtcgattatggcgagaaagacttctatgtgtttgatattctgatcaatgcggaatcaggagacaacacgtacctgactgattatgaaatgcaggacttctgtaatgaatttgggtttaagatggcaccaatgcttggtcgcggcacattcgatagcctgattatgattccgaacgatttcgattcggttctcatggcttacaatgcaacggcgaaagaggacctggtaaaagcgaacaactgcgtctttgatgccaatgtgatcggtgataacactgctgaaggctatgttcttaaaccgtgtgaacccaaatggttaccgaatgggacgcgtgtggcgatcaaatgcaagaactccaaattcagcgagaagaagaaaagtgacaaaccgatcaagacacaagtcccactgacggaaattgataagaatctgctggacgtattggcctgttatgtcactttaaaccgcgtgaacaacgtgatctctaagattggaacagtgacgccgagcgattttgagaaagtaatgtggctgactgttcaggatattctggaagaaacgtcacgtgagggtattgttctgacgacatcggacaatcctgacctcgtcaagaaagaacttgtccgcatggtgcaggatgtgttagaatcggcatggcgcgaactggtgtcg

SEQ ID NO: 924 - protein, 343 aa, synthetic construct
  REGION 1..343: note = variant of RNA ligase 2 from Escherichia phage RB69 (Bacteriophage RB69)
MHHHHHHGGSGMFKKYSSLENHYNSKFIEKLYANGLTDGVWVAREKIHGTNFSLIIERDNVTCAKRTGPIKPTETFYGYEIVLKKYDKAIKTVQKSMYTAGAVSYQVFGEFAGNGIWKGVDYGEKDFYVFDILINAESGDNTYLTDYEMQDFCNEFGFKMAPMLGRGTFDSLIMIPNDFDSVLMAYNATAKEDLVKANNCVFDANVIGDNTAEGYVLKPCEPKWLPNGTRVAIKCKNSKFSEKKKSDKPIKTQVPLTEIDKNLLDVLACYVTLNRVNNVISKIGTVTPSDFEKVMWLTVQDILEETSREGIVLTTSDNPDLVKKELVRMVQDVLESAWRELVS

SEQ ID NO: 925 - DNA, 1029 bp, synthetic construct
  misc_feature 1..1029: note = variant of RNA ligase 2 from Escherichia phage RB69 (Bacteriophage RB69)
  source 1..1029: mol_type = other DNA
atgcatcaccatcaccatcacggtggcagcggtatgtttaagaaatattctagtctggaaaaccattacaatagcaaattcattgagaaactctatgctaacggcttaactgatggtgtatgggttgcgcgcgaaaagatccacgggacgaacttttcgctgattatcgagcgtgataatgtaacatgcgccaaacgtacaggcccgattaagcctaccgaaaccttctacggttatgaaatcgtcctgaagaaatacgataaagcgattaagacggtgcagaaatctatgtataccgccggcgccgtttcctaccaagtgttcggagaatttgctggcaacggtatctggaaaggggtcgattatggcgagaaagacttctatgtgtttgatattctgatcaatgcggaatcaggagacaacacgtacctgactgattatgaaatgcaggacttctgtaatgaatgtgggtttaagatggcaccaatgcttggtcgcggcacattcgatagcctgattatgattccgaacgatttcgattcggttctcatggcttacaatgcaacggcgaaagaggacctggtaaaagcgaacaactgcgtctttgatgccaatcgcatcggtgataacactgctgaaggctatgttcttaaaccgtgtgaacccaaatggttaccgaatgggacgcgtgtggcgatcaaatgcaagaactccaaattcagcgagaagaagaaaagtgacaaaccgatcaagacacaagtcccactgacggaaattgataagaatctgctggacgtattggcctgttatgtcactttaaaccgcgtgaacaacgtgatctctaagattggaacagtgacgccgaccgattttgagaaagtaatgtggctgactgttcaggatattctggaagaaacgtcacgtgagggtattgttctgacgacatcggacaatcctgacctcgtcaagaaagaacttgtccgcatggtgcaggatgagttagaatcggcatggcgcgaactggtgtcg

SEQ ID NO: 926 - protein, 343 aa, synthetic construct
  REGION 1..343: note = variant of RNA ligase 2 from Escherichia phage RB69 (Bacteriophage RB69)
MHHHHHHGGSGMFKKYSSLENHYNSKFIEKLYANGLTDGVWVAREKIHGTNFSLIIERDNVTCAKRTGPIKPTETFYGYEIVLKKYDKAIKTVQKSMYTAGAVSYQVFGEFAGNGIWKGVDYGEKDFYVFDILINAESGDNTYLTDYEMQDFCNECGFKMAPMLGRGTFDSLIMIPNDFDSVLMAYNATAKEDLVKANNCVFDANRIGDNTAEGYVLKPCEPKWLPNGTRVAIKCKNSKFSEKKKSDKPIKTQVPLTEIDKNLLDVLACYVTLNRVNNVISKIGTVTPTDFEKVMWLTVQDILEETSREGIVLTTSDNPDLVKKELVRMVQDELESAWRELVS

SEQ ID NO: 927 - DNA, 1029 bp, synthetic construct
  misc_feature 1..1029: note = variant of RNA ligase 2 from Escherichia phage RB69 (Bacteriophage RB69)
  source 1..1029: mol_type = other DNA
atgcatcaccatcaccatcacggtggcagcggtatgtttaagaaatattctagtctggaaaaccattacaatagcaaattcattgagaaactctatgctaacggcttaactgatggtgtatgggttgcgcgcgaaaagatccacgggacgaacttttcgctgattatcgagcgtgataatgtaacatgcgccaaacgtacaggcccgattaagcctaccgaaaccttctacggttatgaaatcgtcctgaagaaatacgataaagcgattaagacggtgcagaaatctatgtataccgccggcgccgtttcctaccaagtgttcggagaatttgctggcaacggtatctggaaaggggtcgattatggcgagaaagacttctatgtgtttgatattctgatcaatgcggaatcaggagacaacacgtacctgactgattatgaaatgcaggacttctgtaatgaatttgggtttaagatggcaccaatgcttggtcgcggcacattcgatagcctgattatgattccgaacgatttcgattcggttctcatggcttacaatgcagtggcgaaagaggacctggtaaaagcgaacaactgcgtctttgatgccaatgtgatcggtgataacactgctgaaggctatgttcttaaaccgtgtgaacccaaatggttaccgaatgggacgcgtgtggcgatcaaatgcaagaactccaaattcagcgagaagaagaaaagtgacaaaccgatcaagacacaaggcccactgacggaaattgataagaatctgctggacgtattggcctgttatgtcactttaaaccgcgtgaacaacgtgatctctaagattggaacagtgacgccgaaagattttgagaaagtaatgtggctgactgttcaggatattctggaagaaacgtcacgtgagggtattgttctgacgacatcggacaatcctgacctcgtcaagaaagaacttgtccgcatggtgcaggatgagttaaaatcggcatggcgcgaactggtgtcg

SEQ ID NO: 928 - protein, 343 aa, synthetic construct
  REGION 1..343: note = variant of RNA ligase 2 from Escherichia phage RB69 (Bacteriophage RB69)
MHHHHHHGGSGMFKKYSSLENHYNSKFIEKLYANGLTDGVWVAREKIHGTNFSLIIERDNVTCAKRTGPIKPTETFYGYEIVLKKYDKAIKTVQKSMYTAGAVSYQVFGEFAGNGIWKGVDYGEKDFYVFDILINAESGDNTYLTDYEMQDFCNEFGFKMAPMLGRGTFDSLIMIPNDFDSVLMAYNAVAKEDLVKANNCVFDANVIGDNTAEGYVLKPCEPKWLPNGTRVAIKCKNSKFSEKKKSDKPIKTQGPLTEIDKNLLDVLACYVTLNRVNNVISKIGTVTPKDFEKVMWLTVQDILEETSREGIVLTTSDNPDLVKKELVRMVQDELKSAWRELVS

SEQ ID NO: 929 - DNA, 1029 bp, synthetic construct
  misc_feature 1..1029: note = variant of RNA ligase 2 from Escherichia phage RB69 (Bacteriophage RB69)
  source 1..1029: mol_type = other DNA
atgcatcaccatcaccatcacggtggcagcggtatgtttaagaaatattctagtctggaaaaccattacaatagcaaattcattgagaaactctatgctaacggcttaactgatggtgtatgggttgcgcgcgaaaagatccacgggacgaacttttcgctgattatcgagcgtgataatgtaacatgcgccaaacgtacaggcccgattaagcctaccgaaaccttctacggttatgaaatcgtcctgaagaaatacgataaagcgattaagacggtgcagaaatctatgtataccgccggcgccgtttcctaccaagtgttcggagaatttgctggcaacggtatctggaaaggggtcgattatggcgagaaagacttctatgtgtttgatattctgatcaatgcggaatcaggagacaacacgtacctgactgattatgaaatgcaggacttctgtaatgaatttgggtttaagatggcaccaatgcttggtcgcggcacattcgatagcctgattatgattccgaacgatttcgattcggttctcatggcttacaatgcaacggcgaaagaggacctggtaaaagcgaacaactgcgtctttgatgccaatgtgatcggtgataacactgctgaaggctatgttcttaaaccgtgtgaacccaaatggttaccgaatgggacgcgtgtggcgatcaaatgcaagaactccaaattcagcgagaagaagaaaagtgacaaaccgatcaagacacaaggcccactgacggaaattgataagaatctgctggacgtattggcctgttatgtcactttaaaccgcgtgaacaacgtgatctctaagattggaacagtgacgccgaccgattttgagaaagtaatgtggctgactgttcaggatattctggaagaaacgtcacgtgagggtattgttctgacgacatcggacaatcctgacctcgtcaagaaagaacttgtccgcatggtgcaggatgtgttaaaatcggcatggcgcgaactggtgtcg

SEQ ID NO: 930 - protein, 343 aa, synthetic construct
  REGION 1..343: note = variant of RNA ligase 2 from Escherichia phage RB69 (Bacteriophage RB69)
MHHHHHHGGSGMFKKYSSLENHYNSKFIEKLYANGLTDGVWVAREKIHGTNFSLIIERDNVTCAKRTGPIKPTETFYGYEIVLKKYDKAIKTVQKSMYTAGAVSYQVFGEFAGNGIWKGVDYGEKDFYVFDILINAESGDNTYLTDYEMQDFCNEFGFKMAPMLGRGTFDSLIMIPNDFDSVLMAYNATAKEDLVKANNCVFDANVIGDNTAEGYVLKPCEPKWLPNGTRVAIKCKNSKFSEKKKSDKPIKTQGPLTEIDKNLLDVLACYVTLNRVNNVISKIGTVTPTDFEKVMWLTVQDILEETSREGIVLTTSDNPDLVKKELVRMVQDVLKSAWRELVS

SEQ ID NO: 931 - DNA, 1029 bp, synthetic construct
  misc_feature 1..1029: note = variant of RNA ligase 2 from Escherichia phage RB69 (Bacteriophage RB69)
  source 1..1029: mol_type = other DNA
atgcatcaccatcaccatcacggtggcagcggtatgtttaagaaatattctagtctggaaaaccattacaatagcaaattcattgagaaactctatgctaacggcttaactgatggtgtatgggttgcgcgcgaaaagatccacgggacgaacttttcgctgattatcgagcgtgataatgtaacatgcgccaaacgtacaggcccgattaagcctaccgaaaccttctacggttatgaaatcgtcctgaagaaatacgataaagcgattaagacggtgcagaaatctatgtataccgccggcgccgtttcctaccaagtgttcggagaatttgctggcaacggtatctggaaaggggtcgattatggcgagaaagacttctatgtgtttgatattctgatcaatgcggaatcaggagacaacacgtacctgactgattatgaaatgcaggacttctgtaatgaatgtgggtttaagatggcaccaatgcttggtcgcggcacattcgatagcctgattatgattccgaacgatttcgattcggttctcatggcttacaatgcaacggcgaaagaggacctggtaaaagcgaacaacagcgtctttgatgccaatgtgatcggtgataacactgctgaaggctatgttcttaaaccgtgtgaacccaaatggttaccgaatgggacgcgtgtggcgatcaaatgcaagaactccaaattcagcgagaagaagaaaagtgacaaaccgatcaagacacaagtcccactgacggaaattgataagaatctgctggacgtattggcctgttatgtcactttaaaccgcgtgaacaacgtgatctctaagattggaacagtgacgccgaccgattttgagaaagtaatgtggctgactgttcaggatattctggaagaaacgtcacgtgagggtattgttctgacgacatcggacaatcctgacctcgtcaagaaagaacttgtccgcatggtgcaggatgtgttagaatcggcatggcgcgaactggtgtcg

SEQ ID NO: 932 - protein, 343 aa, synthetic construct
  REGION 1..343: note = variant of RNA ligase 2 from Escherichia phage RB69 (Bacteriophage RB69)
MHHHHHHGGSGMFKKYSSLENHYNSKFIEKLYANGLTDGVWVAREKIHGTNFSLIIERDNVTCAKRTGPIKPTETFYGYEIVLKKYDKAIKTVQKSMYTAGAVSYQVFGEFAGNGIWKGVDYGEKDFYVFDILINAESGDNTYLTDYEMQDFCNECGFKMAPMLGRGTFDSLIMIPNDFDSVLMAYNATAKEDLVKANNSVFDANVIGDNTAEGYVLKPCEPKWLPNGTRVAIKCKNSKFSEKKKSDKPIKTQVPLTEIDKNLLDVLACYVTLNRVNNVISKIGTVTPTDFEKVMWLTVQDILEETSREGIVLTTSDNPDLVKKELVRMVQDVLESAWRELVS

SEQ ID NO: 933 - DNA, 1029 bp, synthetic construct
  misc_feature 1..1029: note = variant of RNA ligase 2 from Escherichia phage RB69 (Bacteriophage RB69)
  source 1..1029: mol_type = other DNA
atgcatcaccatcaccatcacggtggcagcggtatgtttaagaaatattctagtctggaaaaccattacaatagcaaattcattgagaaactctatgctaacggcttaactgatggtgtatgggttgcgcgcgaaaagatccacgggacgaacttttcgctgattatcgagcgtgataatgtaacatgcgccaaacgtacaggcccgattaagcctaccgaaaccttctacggttatgaaatcgtcctgaagaaatacgataaagcgattaagacggtgcagaaatctatgtataccgccggcgccgtttcctaccaagtgttcggagaatttgctggcaacggtatctggaaaggggtcgattatggcgagaaagacttctatgtgtttgatattctgatcaatgcggaatcaggagacaacacgtacctgactgattatgaaatgcaggacttctgtaatgaatatgggtttaagatggcaccaatgcttggtcgcggcacattcgatagcctgattatgattccgaacgatttcgattcggttctcatggcttacaatgcagtggcgaaagaggacctggtaaaagcgaacaactgcgtctttgatgccaatcgcatcggtgataacactgctgaaggctatgttcttaaaccgtgtgaacccaaatggttaccgaatgggacgcgtgtggcgatcaaatgcaagaactccaaattcagcgagaagaagaaaagtgacaaaccgatcaagacacaagtcccactgacggaaattgataagaatctgctggacgtattggcctgttatgtcactttaaaccgcgtgaacaacgtgatctctaagattggaacagtgacgccgagcgattttgagaaagtaatgtggctgactgttcaggatattctggaagaaacgtcacgtgagggtattgttctgacgacatcggacaatcctgacctcgtcaagaaagaacttgtccgcatggtgcaggatgtgttaaaatcggcatggcgcgaactggtgtcg

SEQ ID NO: 934 - protein, 343 aa, synthetic construct
  REGION 1..343: note = variant of RNA ligase 2 from Escherichia phage RB69 (Bacteriophage RB69)
MHHHHHHGGSGMFKKYSSLENHYNSKFIEKLYANGLTDGVWVAREKIHGTNFSLIIERDNVTCAKRTGPIKPTETFYGYEIVLKKYDKAIKTVQKSMYTAGAVSYQVFGEFAGNGIWKGVDYGEKDFYVFDILINAESGDNTYLTDYEMQDFCNEYGFKMAPMLGRGTFDSLIMIPNDFDSVLMAYNAVAKEDLVKANNCVFDANRIGDNTAEGYVLKPCEPKWLPNGTRVAIKCKNSKFSEKKKSDKPIKTQVPLTEIDKNLLDVLACYVTLNRVNNVISKIGTVTPSDFEKVMWLTVQDILEETSREGIVLTTSDNPDLVKKELVRMVQDVLKSAWRELVS

SEQ ID NO: 935 - DNA, 1029 bp, synthetic construct
  misc_feature 1..1029: note = variant of RNA ligase 2 from Escherichia phage RB69 (Bacteriophage RB69)
  source 1..1029: mol_type = other DNA
atgcatcaccatcaccatcacggtggcagcggtatgtttaagaaatattctagtctggaaaaccattacaatagcaaattcattgagaaactctatgctaacggcttaactgatggtgtatgggttgcgcgcgaaaagatccacgggacgaacttttcgctgattatcgagcgtgataatgtaacatgcgccaaacgtacaggcccgattaagcctaccgaaaccttctacggttatgaaatcgtcctgaagaaatacgataaagcgattaagacggtgcagaaatctatgtataccgccggcgccgtttcctaccaagtgttcggagaatttgctggcaacggtatctggaaaggggtcgattatggcgagaaagacttctatgtgtttgatattctgatcaatgcggaatcaggagacaacacgtacctgactgattatgaaatgcaggacttctgtaatgaatatgggtttaagatggcaccaatgcttggtcgcggcacattcgatagcctgattatgattccgaacgatttcgattcggttctcatggcttacaatgcagtggcgaaagaggacctggtaaaagcgaacaacagcgtctttgatgccaatcgcatcggtgataacactgctgaaggctatgttcttaaaccgtgtgaacccaaatggttaccgaatgggacgcgtgtggcgatcaaatgcaagaactccaaattcagcgagaagaagaaaagtgacaaaccgatcaagacacaaggcccactgacggaaattgataagaatctgctggacgtattggcctgttatgtcactttaaaccgcgtgaacaacgtgatctctaagattggaacagtgacgccgaccgattttgagaaagtaatgtggctgactgttcaggatattctggaagaaacgtcacgtgagggtattgttctgacgacatcggacaatcctgacctcgtcaagaaagaacttgtccgcatggtgcaggatgagttaaaatcggcatggcgcgaactggtgtcg

SEQ ID NO: 936 - protein, 343 aa, synthetic construct
  REGION 1..343: note = variant of RNA ligase 2 from Escherichia phage RB69 (Bacteriophage RB69)
MHHHHHHGGSGMFKKYSSLENHYNSKFIEKLYANGLTDGVWVAREKIHGTNFSLIIERDNVTCAKRTGPIKPTETFYGYEIVLKKYDKAIKTVQKSMYTAGAVSYQVFGEFAGNGIWKGVDYGEKDFYVFDILINAESGDNTYLTDYEMQDFCNEYGFKMAPMLGRGTFDSLIMIPNDFDSVLMAYNAVAKEDLVKANNSVFDANRIGDNTAEGYVLKPCEPKWLPNGTRVAIKCKNSKFSEKKKSDKPIKTQGPLTEIDKNLLDVLACYVTLNRVNNVISKIGTVTPTDFEKVMWLTVQDILEETSREGIVLTTSDNPDLVKKELVRMVQDELKSAWRELVS

SEQ ID NO: 937 - DNA, 1029 bp, synthetic construct
  misc_feature 1..1029: note = variant of RNA ligase 2 from Escherichia phage RB69 (Bacteriophage RB69)
  source 1..1029: mol_type = other DNA
atgcatcaccatcaccatcacggtggcagcggtatgtttaagaaatattctagtctggaaaaccattacaatagcaaattcattgagaaactctatgctaacggcttaactgatggtgtatgggttgcgcgcgaaaagatccacgggacgaacttttcgctgattatcgagcgtgataatgtaacatgcgccaaacgtacaggcccgattaagcctaccgaaaccttctacggttatgaaatcgtcctgaagaaatacgataaagcgattaagacggtgcagaaatctatgtataccgccggcgccgtttcctaccaagtgttcggagaatttgctggcaacggtatctggaaaggggtcgattatggcgagaaagacttctatgtgtttgatattctgatcaatgcggaatcaggagacaacacgtacctgactgattatgaaatgcaggacttctgtaatgaatatgggtttaagatggcaccaatgcttggtcgcggcacattcgatagcctgattatgattccgaacgatttcgattcggttctcatggcttacaatgcaaccgcgaaagaggacctggtaaaagcgaacaactgcgtctttgatgccaatgtgatcggtgataacactgctgaaggctatgttcttaaaccgtgtgaacccaaatggttaccgaatgggacgcgtgtggcgatcaaatgcaagaactccaaattcagcgagaagaagaaaagtgacaaaccgatcaagacacaagtcccactgacggaaattgataagaatctgctggacgtattggcctgttatgtcactttaaaccgcgtgaacaacgtgatctctaagattggaacagtgacgccgcatgattttgagaaagtaatgtggctgactgttcaggatattctggaagaaacgtcacgtgagggtattgttctgacgacatcggacaatcctgacctcgtcaagaaagaacttgtccgcatggtgcaggatgagttaaaatcggcatggcgcgaactggtgtcg

SEQ ID NO: 938 - protein, 343 aa, synthetic construct
  REGION 1..343: note = variant of RNA ligase 2 from Escherichia phage RB69 (Bacteriophage RB69)
MHHHHHHGGSGMFKKYSSLENHYNSKFIEKLYANGLTDGVWVAREKIHGTNFSLIIERDNVTCAKRTGPIKPTETFYGYEIVLKKYDKAIKTVQKSMYTAGAVSYQVFGEFAGNGIWKGVDYGEKDFYVFDILINAESGDNTYLTDYEMQDFCNEYGFKMAPMLGRGTFDSLIMIPNDFDSVLMAYNATAKEDLVKANNCVFDANVIGDNTAEGYVLKPCEPKWLPNGTRVAIKCKNSKFSEKKKSDKPIKTQVPLTEIDKNLLDVLACYVTLNRVNNVISKIGTVTPHDFEKVMWLTVQDILEETSREGIVLTTSDNPDLVKKELVRMVQDELKSAWRELVS

SEQ ID NO: 939 - DNA, 1029 bp, synthetic construct
  misc_feature 1..1029: note = variant of RNA ligase 2 from Escherichia phage RB69 (Bacteriophage RB69)
  source 1..1029: mol_type = other DNA
atgcatcaccatcaccatcacggtggcagcggtatgtttaagaaatattctagtctggaaaaccattacaatagcaaattcattgagaaactctatgctaacggcttaactgatggtgtatgggttgcgcgcgaaaagatccacgggacgaacttttcgctgattatcgagcgtgataatgtaacatgcgccaaacgtacaggcccgattaagcctaccgaaaccttctacggttatgaaatcgtcctgaagaaatacgataaagcgattaagacggtgcagaaatctatgtataccgccggcgccgtttcctaccaagtgttcggagaatttgctggcaacggtatctggaaaggggtcgattatggcgagaaagacttctatgtgtttgatattctgatcaatgcggaatcaggagacaacacgtacctgactgattatgaaatgcaggacttctgtaatgaatatgggtttaagatggcaccaatgcttggtcgcggcacattcgatagcctgattatgattccgaacgatttcgattcggttctcatggcttacaatgcactggcgaaagaggacctggtaaaagcgaacaactgcgtctttgatgccaatgtgatcggtgataacactgctgaaggctatgttcttaaaccgtgtgaacccaaatggttaccgaatgggacgcgtgtggcgatcaaatgcaagaactccaaattcagcgagaagaagaaaagtgacaaaccgatcaagacacaaggcccactgacggaaattgataagaatctgctggacgtattggcctgttatgtcactttaaaccgcgtgaacaacgtgatctctaagattggaacagtgacgccgaccgattttgagaaagtaatgtggctgactgttcaggatattctggaagaaacgtcacgtgagggtattgttctgacgacatcggacaatcctgacctcgtcaagaaagaacttgtccgcatggtgcaggatgagttaaaatcggcatggcgcgaactggtgtcg

SEQ ID NO: 940 - protein, 343 aa, synthetic construct
  REGION 1..343: note = variant of RNA ligase 2 from Escherichia phage RB69 (Bacteriophage RB69)
MHHHHHHGGSGMFKKYSSLENHYNSKFIEKLYANGLTDGVWVAREKIHGTNFSLIIERDNVTCAKRTGPIKPTETFYGYEIVLKKYDKAIKTVQKSMYTAGAVSYQVFGEFAGNGIWKGVDYGEKDFYVFDILINAESGDNTYLTDYEMQDFCNEYGFKMAPMLGRGTFDSLIMIPNDFDSVLMAYNALAKEDLVKANNCVFDANVIGDNTAEGYVLKPCEPKWLPNGTRVAIKCKNSKFSEKKKSDKPIKTQGPLTEIDKNLLDVLACYVTLNRVNNVISKIGTVTPTDFEKVMWLTVQDILEETSREGIVLTTSDNPDLVKKELVRMVQDELKSAWRELVS

SEQ ID NO: 941 - DNA, 1029 bp, synthetic construct
  misc_feature 1..1029: note = variant of RNA ligase 2 from Escherichia phage RB69 (Bacteriophage RB69)
  source 1..1029: mol_type = other DNA
atgcatcaccatcaccatcacggtggcagcggtatgtttaagaaatattctagtctggaaaaccattacaatgcgaaattcattgagaaactctatgctaacggcttaactgatggtgtatgggttgcgcgcgaaaagatccacgggacgaacttttcgctgattatcgagcgtgataatgtaacatgcgccaaacgtacaggcccgattaagcctaccgaaaccttctacggttatgaaatcgtcctgaagaaatacgataaagcgattaagacggtgcagaaatctatgtataccgccggcgccgtttcctaccaagtgttcggagaatttgctggcaacggtatctggaaaggggtcgattatggcgagaaagacttctatgtgtttgatattctgatcaatgcggaatcaggagacaacacgtacctgactgattatgaaatgcaggacttctgtaatgaatgtgggtttaagatggcaccaatgcttggtcgcggcacattcgatagcctgattatgattccgaacgatttcgattcggttctcatggcttacaatgcaaccgcgaaagaggacctggtaaaagcgaacaactgcgtctttgatgccaatgtgatcggtgataacactgctgaaggctatgttcttaaaccgtgtgaacccaaatggttaccgaatgggacgcgtgtggcgatcaaatgcaagaactccaaattcagcgagaagaagaaaagtgacaaaccgatcaagacacaaggcccactgacggaaattgataagaatctgctggacgtattggcctgttatgtcactttaaaccgcgtgaacaacgtgatctctaagattggaacagtgacgccgcatgattttgagaaagtaatgtggctgactgttcaggatattctggaagaaacgtcacgtgagggtattgttctgacgacatcggacaatcctgacctcgtcaagaaagaacttgtccgcatggtgcaggatgagttaaaatcggcatggcgcgaactggtgtcg

SEQ ID NO: 942 - protein, 343 aa, synthetic construct
  REGION 1..343: note = variant of RNA ligase 2 from Escherichia phage RB69 (Bacteriophage RB69)
MHHHHHHGGSGMFKKYSSLENHYNAKFIEKLYANGLTDGVWVAREKIHGTNFSLIIERDNVTCAKRTGPIKPTETFYGYEIVLKKYDKAIKTVQKSMYTAGAVSYQVFGEFAGNGIWKGVDYGEKDFYVFDILINAESGDNTYLTDYEMQDFCNECGFKMAPMLGRGTFDSLIMIPNDFDSVLMAYNATAKEDLVKANNCVFDANVIGDNTAEGYVLKPCEPKWLPNGTRVAIKCKNSKFSEKKKSDKPIKTQGPLTEIDKNLLDVLACYVTLNRVNNVISKIGTVTPHDFEKVMWLTVQDILEETSREGIVLTTSDNPDLVKKELVRMVQDELKSAWRELVS

SEQ ID NO: 943 - DNA, 1029 bp, synthetic construct
  misc_feature 1..1029: note = variant of RNA ligase 2 from Escherichia phage RB69 (Bacteriophage RB69)
  source 1..1029: mol_type = other DNA
atgcatcaccatcaccatcacggtggcagcggtatgtttaagaaatattctagtctggaaaaccattacaatagcaaattcattgagaaactctatgctaacggcttaactgatggtgtatgggttgcgcgcgaaaagatccacgggacgaacttttcgctgattatcgagcgtgataatgtaacatgcgccaaacgtacaggcccgattaagcctaccgaaaccttctacggttatgaaatcgtcctgaagaaatacgataaagcgattaagacggtgcagaaatctatgtataccgccggcgccgtttcctaccaagtgttcggagaatttgctggcaacggtatctggaaaggggtcgattatggcgagaaagacttctatgtgtttgatattctgatcaatgcggaatcaggagacaacacgtacctgactgattatgaaatgcaggacttctgtaatgaatgtgggtttaagatggcaccaatgcttggtcgcggcacattcgatagcctgattatgattccgaacgatttcgattcggttctcatggcttacaatgcactggcgaaagaggacctggtaaaagcgaacaactgcgtctttgatgccaatgtgatcggtgataacactgctgaaggctatgttcttaaaccgtgtgaacccaaatggttaccgaatgggacgcgtgtggcgatcaaatgcaagaactccaaattcagcgagaagaagaaaagtgacaaaccgatcaagacacaagtcccactgacggaaattgataagaatctgctggacgtattggcctgttatgtcactttaaaccgcgtgaacaacgtgatctctaagattggaacagtgacgccgagcgattttgagaaagtaatgtggctgactgttcaggatattctggaagaaacgtcacgtgagggtattgttctgacgacatcggacaatcctgacctcgtcaagaaagaacttgtccgcatggtgcaggatgagttagaatcggcatggcgcgaactggtgtcg

SEQ ID NO: 944 - protein, 343 aa, synthetic construct
  REGION 1..343: note = variant of RNA ligase 2 from Escherichia phage RB69 (Bacteriophage RB69)
MHHHHHHGGSGMFKKYSSLENHYNSKFIEKLYANGLTDGVWVAREKIHGTNFSLIIERDNVTCAKRTGPIKPTETFYGYEIVLKKYDKAIKTVQKSMYTAGAVSYQVFGEFAGNGIWKGVDYGEKDFYVFDILINAESGDNTYLTDYEMQDFCNECGFKMAPMLGRGTFDSLIMIPNDFDSVLMAYNALAKEDLVKANNCVFDANVIGDNTAEGYVLKPCEPKWLPNGTRVAIKCKNSKFSEKKKSDKPIKTQVPLTEIDKNLLDVLACYVTLNRVNNVISKIGTVTPSDFEKVMWLTVQDILEETSREGIVLTTSDNPDLVKKELVRMVQDELESAWRELVS

SEQ ID NO: 945 - DNA, 1029 bp, synthetic construct
  misc_feature 1..1029: note = variant of RNA ligase 2 from Escherichia phage RB69 (Bacteriophage RB69)
  source 1..1029: mol_type = other DNA
atgcatcaccatcaccatcacggtggcagcggtatgtttaagaaatattctagtctggaaaaccattacaatagcaaattcattgagaaactctatgctaacggcttaactgatggtgtatgggttgcgcgcgaaaagatccacgggacgaacttttcgctgattatcgagcgtgataatgtaacatgcgccaaacgtacaggcccgattaagcctaccgaaaccttctacggttatgaaatcgtcctgaagaaatacgataaagcgattaagacggtgcagaaatctatgtataccgccggcgccgtttcctaccaagtgttcggagaatttgctggcaacggtatctggaaaggggtcgattatggcgagaaagacttctatgtgtttgatattctgatcaatgcggaatcaggagacaacacgtacctgactgattatgaaatgcaggacttctgtaatgaatgtgggtttaagatggcaccaatgcttggtcgcggcacattcgatagcctgattatgattccgaacgatttcgattcggttctcatggcttacaatgcaaccgcgaaagaggacctggtaaaagcgaacaacagcgtctttgatgccaatgtgatcggtgataacactgctgaaggctatgttcttaaaccgtgtgaacccaaatggttaccgaatgggacgcgtgtggcgatcaaatgcaagaactccaaattcagcgagaagaagaaaagtgacaaaccgatcaagacacaagtcccactgacggaaattgataagaatctgctggacgtattggcctgttatgtcactttaaaccgcgtgaacaacgtgatctctaagattggaacagtgacgccgaaagattttgagaaagtaatgtggctgactgttcaggatattctggaagaaacgtcacgtgagggtattgttctgacgacatcggacaatcctgacctcgtcaagaaagaacttgtccgcatggtgcaggatgtgttagaatcggcatggcgcgaactggtgtcg

SEQ ID NO: 946 - protein, 343 aa, synthetic construct
  REGION 1..343: note = variant of RNA ligase 2 from Escherichia phage RB69 (Bacteriophage RB69)
MHHHHHHGGSGMFKKYSSLENHYNSKFIEKLYANGLTDGVWVAREKIHGTNFSLIIERDNVTCAKRTGPIKPTETFYGYEIVLKKYDKAIKTVQKSMYTAGAVSYQVFGEFAGNGIWKGVDYGEKDFYVFDILINAESGDNTYLTDYEMQDFCNECGFKMAPMLGRGTFDSLIMIPNDFDSVLMAYNATAKEDLVKANNSVFDANVIGDNTAEGYVLKPCEPKWLPNGTRVAIKCKNSKFSEKKKSDKPIKTQVPLTEIDKNLLDVLACYVTLNRVNNVISKIGTVTPKDFEKVMWLTVQDILEETSREGIVLTTSDNPDLVKKELVRMVQDVLESAWRELVS

SEQ ID NO: 947 - DNA, 1029 bp, synthetic construct
  misc_feature 1..1029: note = variant of RNA ligase 2 from Escherichia phage RB69 (Bacteriophage RB69)
  source 1..1029: mol_type = other DNA
atgcatcaccatcaccatcacggtggcagcggtatgtttaagaaatattctagtctggaaaaccattacaattcgaaattcattgagaaactctatgctaacggcttaactgatggtgtatgggttgcgcgcgaaaagatccacgggacgaacttttcgctgattatcgagcgtgataatgtaacatgcgccaaacgtacaggcccgattaagcctaccgaaaccttctacggttatgaaatcgtcctgaagaaatacgataaagcgattaagacggtgcagaaatctatgtataccgccggcgccgtttcctaccaagtgttcggagaatttgctggcaacggtatctggaaaggggtcgattatggcgagaaagacttctatgtgtttgatattctgatcaatgcggaatcaggagacaacacgtacctgactgattatgaaatgcaggacttctgtaatgaatatgggtttaagatggcaccaatgcttggtcgcggcacattcgatagcctgattatgattccgaacgatttcgattcggttctcatggcttacaatgcagtggcgaaagaggacctggtaaaagcgaacaactgcgtctttgatgccaatgtgatcggtgataacactgctgaaggctatgttcttaaaccgtgtgaacccaaatggttaccgaatgggacgcgtgtggcgatcaaatgcaagaactccaaattcagcgagaagaagaaaagtgacaaaccgatcaagacacaagtcccactgacggaaattgataagaatctgctggacgtattggcctgttatgtcactttaaaccgcgtgaacaacgtgatctctaagattggaacagtgacgccgagcgattttgagaaagtaatgtggctgactgttcaggatattctggaagaaacgtcacgtgagggtattgttctgacgacatcggacaatcctgacctcgtcaagaaagaacttgtccgcatggtgcaggatgtgttaaaatcggcatggcgcgaactggtgtcg

SEQ ID NO: 948 - protein, 343 aa, synthetic construct
  REGION 1..343: note = variant of RNA ligase 2 from Escherichia phage RB69 (Bacteriophage RB69)
MHHHHHHGGSGMFKKYSSLENHYNSKFIEKLYANGLTDGVWVAREKIHGTNFSLIIERDNVTCAKRTGPIKPTETFYGYEIVLKKYDKAIKTVQKSMYTAGAVSYQVFGEFAGNGIWKGVDYGEKDFYVFDILINAESGDNTYLTDYEMQDFCNEYGFKMAPMLGRGTFDSLIMIPNDFDSVLMAYNAVAKEDLVKANNCVFDANVIGDNTAEGYVLKPCEPKWLPNGTRVAIKCKNSKFSEKKKSDKPIKTQVPLTEIDKNLLDVLACYVTLNRVNNVISKIGTVTPSDFEKVMWLTVQDILEETSREGIVLTTSDNPDLVKKELVRMVQDVLKSAWRELVS

SEQ ID NO: 949 - DNA, 1029 bp, synthetic construct
  misc_feature 1..1029: note = variant of RNA ligase 2 from Escherichia phage RB69 (Bacteriophage RB69)
  source 1..1029: mol_type = other DNA
atgcatcaccatcaccatcacggtggcagcggtatgtttaagaaatattctagtctggaaaaccattacaatagcaaattcattgagaaactctatgctaacggcttaactgatggtgtatgggttgcgcgcgaaaagatccacgggacgaacttttcgctgattatcgagcgtgataatgtaacatgcgccaaacgtacaggcccgattaagcctaccgaaaccttctacggttatgaaatcgtcctgaagaaatacgataaagcgattaagacggtgcagaaatctatgtataccgccggcgccgtttcctaccaagtgttcggagaatttgctggcaacggtatctggaaaggggtcgattatggcgagaaagacttctatgtgtttgatattctgatcaatgcggaatcaggagacaacacgtacctgactgattatgaaatgcaggacttctgtaatgaatttgggtttaagatggcaccaatgcttggtcgcggcacattcgatagcctgattatgattccgaacgatttcgattcggttctcatggcttacaatgcactggcgaaagaggacctggtaaaagcgaacaacagcgtctttgatgccaatgtgatcggtgataacactgctgaaggctatgttcttaaaccgtgtgaacccaaatggttaccgaatgggacgcgtgtggcgatcaaatgcaagaactccaaattcagcgagaagaagaaaagtgacaaaccgatcaagacacaagtcccactgacggaaattgataagaatctgctggacgtattggcctgttatgtcactttaaaccgcgtgaacaacgtgatctctaagattggaacagtgacgccgaaagattttgagaaagtaatgtggctgactgttcaggatattctggaagaaacgtcacgtgagggtattgttctgacgacatcggacaatcctgacctcgtcaagaaagaacttgtccgcatggtgcaggatgagttagaatcggcatggcgcgaactggtgtcg

SEQ ID NO: 950 - protein, 343 aa, synthetic construct
  REGION 1..343: note = variant of RNA ligase 2 from Escherichia phage RB69 (Bacteriophage RB69)
MHHHHHHGGSGMFKKYSSLENHYNSKFIEKLYANGLTDGVWVAREKIHGTNFSLIIERDNVTCAKRTGPIKPTETFYGYEIVLKKYDKAIKTVQKSMYTAGAVSYQVFGEFAGNGIWKGVDYGEKDFYVFDILINAESGDNTYLTDYEMQDFCNEFGFKMAPMLGRGTFDSLIMIPNDFDSVLMAYNALAKEDLVKANNSVFDANVIGDNTAEGYVLKPCEPKWLPNGTRVAIKCKNSKFSEKKKSDKPIKTQVPLTEIDKNLLDVLACYVTLNRVNNVISKIGTVTPKDFEKVMWLTVQDILEETSREGIVLTTSDNPDLVKKELVRMVQDELESAWRELVS

SEQ ID NO: 951 - DNA, 1029 bp, synthetic construct
  misc_feature 1..1029: note = variant of RNA ligase 2 from Escherichia phage RB69 (Bacteriophage RB69)
  source 1..1029: mol_type = other DNA
atgcatcaccatcaccatcacggtggcagcggtatgtttaagaaatattctagtctggaaaaccattacaatagcaaattcattgagaaactctatgctaacggcttaactgatggtgtatgggttgcgcgcgaaaagatccacgggacgaacttttcgctgattatcgagcgtgataatgtaacatgcgccaaacgtacaggcccgattaagcctaccgaaaccttctacggttatgaaatcgtcctgaagaaatacgataaagcgattaagacggtgcagaaatctatgtataccgccggcgccgtttcctaccaagtgttcggagaatttgctggcaacggtatctggaaaggggtcgattatggcgagaaagacttctatgtgtttgatattctgatcaatgcggaatcaggagacaacacgtacctgactgattatgaaatgcaggacttctgtaatgaatgtgggtttaagatggcaccaatgcttggtcgcggcacattcgatagcctgattatgattccgaacgatttcgattcggttctcatggcttacaatgcaaccgcgaaagaggacctggtaaaagcgaacaactgcgtctttgatgccaatgtgatcggtgataacactgctgaaggctatgttcttaaaccgtgtgaacccaaatggttaccgaatgggacgcgtgtggcgatcaaatgcaagaactccaaattcagcgagaagaagaaaagtgacaaaccgatcaagacacaagtcccactgacggaaattgataagaatctgctggacgtattggcctgttatgtcactttaaaccgcgtgaacaacgtgatctctaagattggaacagtgacgccgaccgattttgagaaagtaatgtggctgactgttcaggatattctggaagaaacgtcacgtgagggtattgttctgacgacatcggacaatcctgacctcgtcaagaaagaacttgtccgcatggtgcaggatgtgttaaaatcggcatggcgcgaactggtgtcg

SEQ ID NO: 952 - protein, 343 aa, synthetic construct; identical to SEQ ID NO: 578
  REGION 1..343: note = variant of RNA ligase 2 from Escherichia phage RB69 (Bacteriophage RB69)

SEQ ID NO: 953 - DNA, 1029 bp, synthetic construct
  misc_feature 1..1029: note = variant of RNA ligase 2 from Escherichia phage RB69 (Bacteriophage RB69)
  source 1..1029: mol_type = other DNA
atgcatcaccatcaccatcacggtggcagcggtatgtttaagaaatattctagtctggaaaaccattacaatagcaaattcattgagaaactctatgctaacggcttaactgatggtgtatgggttgcgcgcgaaaagatccacgggacgaacttttcgctgattatcgagcgtgataatgtaacatgcgccaaacgtacaggcccgattaagcctaccgaaaccttctacggttatgaaatcgtcctgaagaaatacgataaagcgattaagacggtgcagaaatctatgtataccgccggcgccgtttcctaccaagtgttcggagaatttgctggcaacggtatctggaaaggggtcgattatggcgagaaagacttctatgtgtttgatattctgatcaatgcggaatcaggagacaacacgtacctgactgattatgaaatgcaggacttctgtaatgaatttgggtttaagatggcaccaatgcttggtcgcggcacattcgatagcctgattatgattccgaacgatttcgattcggttctcatggcttacaatgcaaccgcgaaagaggacctggtaaaagcgaacaacagcgtctttgatgccaatgtgatcggtgataacactgctgaaggctatgttcttaaaccgtgtgaacccaaatggttaccgaatgggacgcgtgtggcgatcaaatgcaagaactccaaattcagcgagaagaagaaaagtgacaaaccgatcaagacacaagtcccactgacggaaattgataagaatctgctggacgtattggcctgttatgtcactttaaaccgcgtgaacaacgtgatctctaagattggaacagtgacgccgaccgattttgagaaagtaatgtggctgactgttcaggatattctggaagaaacgtcacgtgagggtattgttctgacgacatcggacaatcctgacctcgtcaagaaagaacttgtccgcatggtgcaggatgtgttagaatcggcatggcgcgaactggtgtcg

SEQ ID NO: 954 - protein, 343 aa, synthetic construct
  REGION 1..343: note = variant of RNA ligase 2 from Escherichia phage RB69 (Bacteriophage RB69)
MHHHHHHGGSGMFKKYSSLENHYNSKFIEKLYANGLTDGVWVAREKIHGTNFSLIIERDNVTCAKRTGPIKPTETFYGYEIVLKKYDKAIKTVQKSMYTAGAVSYQVFGEFAGNGIWKGVDYGEKDFYVFDILINAESGDNTYLTDYEMQDFCNEFGFKMAPMLGRGTFDSLIMIPNDFDSVLMAYNATAKEDLVKANNSVFDANVIGDNTAEGYVLKPCEPKWLPNGTRVAIKCKNSKFSEKKKSDKPIKTQVPLTEIDKNLLDVLACYVTLNRVNNVISKIGTVTPTDFEKVMWLTVQDILEETSREGIVLTTSDNPDLVKKELVRMVQDVLESAWRELVS

SEQ ID NO: 955 - DNA, 1029 bp, synthetic construct
  misc_feature 1..1029: note = variant of RNA ligase 2 from Escherichia phage RB69 (Bacteriophage RB69)
  source 1..1029: mol_type = other DNA
atgcatcaccatcaccatcacggtggcagcggtatgtttaagaaatattctagtctggaaaaccattacaatagcaaattcattgagaaactctatgctaacggcttaactgatggtgtatgggttgcgcgcgaaaagatccacgggacgaacttttcgctgattatcgagcgtgataatgtaacatgcgccaaacgtacaggcccgattaagcctaccgaaaccttctacggttatgaaatcgtcctgaagaaatacgataaagcgattaagacggtgcagaaatctatgtataccgccggcgccgtttcctaccaagtgttcggagaatttgctggcaacggtatctggaaaggggtcgattatggcgagaaagacttctatgtgtttgatattctgatcaatgcggaatcaggagacaacacgtacctgactgattatgaaatgcaggacttctgtaatgaatgtgggtttaagatggcaccaatgcttggtcgcggcacattcgatagcctgattatgattccgaacgatttcgattcggttctcatggcttacaatgcaacggcgaaagaggacctggtaaaagcgaacaactgcgtctttgatgccaatgtgatcggtgataacactgctgaaggctatgttcttaaaccgtgtgaacccaaatggttaccgaatgggacgcgtgtggcgatcaaatgcaagaactccaaattcagcgagaagaagaaaagtgacaaaccgatcaagacacaaggcccactgacggaaattgataagaatctgctggacgtattggcctgttatgtcactttaaaccgcgtgaacaacgtgatctctaagattggaacagtgacgccgagcgattttgagaaagtaatgtggctgactgttcaggatattctggaagaaacgtcacgtgagggtattgttctgacgacatcggacaatcctgacctcgtcaagaaagaacttgtccgcatggtgcaggatgagttaaaatcggcatggcgcgaactggtgtcg

SEQ ID NO: 956 - protein, 343 aa, synthetic construct
  REGION 1..343: note = variant of RNA ligase 2 from Escherichia phage RB69 (Bacteriophage RB69)
MHHHHHHGGSGMFKKYSSLENHYNSKFIEKLYANGLTDGVWVAREKIHGTNFSLIIERDNVTCAKRTGPIKPTETFYGYEIVLKKYDKAIKTVQKSMYTAGAVSYQVFGEFAGNGIWKGVDYGEKDFYVFDILINAESGDNTYLTDYEMQDFCNECGFKMAPMLGRGTFDSLIMIPNDFDSVLMAYNATAKEDLVKANNCVFDANVIGDNTAEGYVLKPCEPKWLPNGTRVAIKCKNSKFSEKKKSDKPIKTQGPLTEIDKNLLDVLACYVTLNRVNNVISKIGTVTPSDFEKVMWLTVQDILEETSREGIVLTTSDNPDLVKKELVRMVQDELKSAWRELVS

SEQ ID NO: 957 - DNA, 1029 bp, synthetic construct
  misc_feature 1..1029: note = variant of RNA ligase 2 from Escherichia phage RB69 (Bacteriophage RB69)
  source 1..1029: mol_type = other DNA
atgcatcaccatcaccatcacggtggcagcggtatgtttaagaaatattctagtctggaaaaccattacaatagcaaattcattgagaaactctatgctaacggcttaactgatggtgtatgggttgcgcgcgaaaagatccacgggacgaacttttcgctgattatcgagcgtgataatgtaacatgcgccaaacgtacaggcccgattaagcctaccgaaaccttctacggttatgaaatcgtcctgaagaaatacgataaagcgattaagacggtgcagaaatctatgtataccgccggcgccgtttcctaccaagtgttcggagaatttgctggcaacggtatctggaaaggggtcgattatggcgagaaagacttctatgtgtttgatattctgatcaatgcggaatcaggagacaacacgtacctgactgattatgaaatgcaggacttctgtaatgaatttgggtttaagatggcaccaatgcttggtcgcggcacattcgatagcctgattatgattccgaacgatttcgattcggttctcatggcttacaatgcaaccgcgaaagaggacctggtaaaagcgaacaacagcgtctttgatgccaatgtgatcggtgataacactgctgaaggctatgttcttaaaccgtgtgaacccaaatggttaccgaatgggacgcgtgtggcgatcaaatgcaagaactccaaattcagcgagaagaagaaaagtgacaaaccgatcaagacacaagtcccactgacggaaattgataagaatctgctggacgtattggcctgttatgtcactttaaaccgcgtgaacaacgtgatctctaagattggaacagtgacgccgcatgattttgagaaagtaatgtggctgactgttcaggatattctggaagaaacgtcacgtgagggtattgttctgacgacatcggacaatcctgacctcgtcaagaaagaacttgtccgcatggtgcaggatgagttagaatcggcatggcgcgaactggtgtcg

SEQ ID NO: 958 - protein, 343 aa, synthetic construct
  REGION 1..343: note = variant of RNA ligase 2 from Escherichia phage RB69 (Bacteriophage RB69)
MHHHHHHGGSGMFKKYSSLENHYNSKFIEKLYANGLTDGVWVAREKIHGTNFSLIIERDNVTCAKRTGPIKPTETFYGYEIVLKKYDKAIKTVQKSMYTAGAVSYQVFGEFAGNGIWKGVDYGEKDFYVFDILINAESGDNTYLTDYEMQDFCNEFGFKMAPMLGRGTFDSLIMIPNDFDSVLMAYNATAKEDLVKANNSVFDANVIGDNTAEGYVLKPCEPKWLPNGTRVAIKCKNSKFSEKKKSDKPIKTQVPLTEIDKNLLDVLACYVTLNRVNNVISKIGTVTPHDFEKVMWLTVQDILEETSREGIVLTTSDNPDLVKKELVRMVQDELESAWRELVS
